(19) United States
(12) Patent Application Publication
(10) Pub. No.: US 2016/0046991 A1
(43) Pub. Date: Feb. 18, 2016

(54) GENETIC POLYMORPHISMS ASSOCIATED WITH LIVER FIBROSIS, METHODS OF DETECTION AND USES THEREOF

(71) Applicants: Hongjin HUANG, Union City, CA (US); Ramasubbu VENKATESH, San Jose, CA (US); Michele CARGILL, Orinda, CA (US)

(72) Inventors: Hongjin HUANG, Union City, CA (US); Ramasubbu VENKATESH, San Jose, CA (US); Michele CARGILL, Orinda, CA (US)

(73) Assignee: CELERA CORPORATION, Alameda, CA (US)

(21) Appl. No.: 14/477,078

(22) Filed: Sep. 4, 2014

Related U.S. Application Data
(62) Division of application No. 13/480,817, filed on May 25, 2012, now abandoned.
Application No. 13/480,817 is a division of application No. 12/769,896, filed on Apr. 29, 2010, now Pat. No. 8,211,638.
Application No. 12/769,896 is a continuation of application No. 11/796,733, filed on Apr. 26, 2007, now Pat. No. 7,727,725.
(60) Provisional application No. 60/796,264, filed on Apr. 27, 2006.
(60) Provisional application No. 60/842,052, filed on Sep. 1, 2006.

(51) Int. Cl. C12Q 1/68

(52) U.S. Cl. CPC C12Q 1/6883; C12Q 2600/156; C12Q 2600/112

(57) ABSTRACT

The present invention is based on the discovery of genetic polymorphisms that are associated with liver fibrosis and related pathologies. In particular, the present invention relates to nucleic acid molecules containing the polymorphisms, including groups of nucleic acid molecules that may be used as a signature marker set, variant proteins encoded by such nucleic acid molecules, reagents for detecting the polymorphic nucleic acid molecules and proteins, and methods of using the nucleic acid and proteins as well as methods of using reagents for their detection.

### CROSS-REFERENCE TO RELATED APPLICATIONS

[0001] This application is a divisional application of U.S. non-provisional application Ser. No. 13/480,817, filed on May 25, 2012, which is a divisional application of U.S. non-provisional application Ser. No. 12/769,896, filed on Apr. 29, 2010, now U.S. Pat. No. 8,211,638, which is a continuation of U.S. non-provisional application Ser. No. 11/796,733, filed on Apr. 26, 2007, now U.S. Pat. No. 7,727,725, which claims priority to U.S. provisional application Ser. No. 60/796,264, filed on Apr. 27, 2006, and U.S. provisional application No. 60/842,052, filed on Sep. 1, 2006, the contents of each of which are hereby incorporated by reference in their entirety into this application.

### FIELD OF THE INVENTION

[0002] The present invention is in the field of fibrosis diagnosis and therapy and in particular liver fibrosis diagnosis and therapy, and more particularly, liver fibrosis associated with hepatitis C virus (HCV) infection. More specifically, the present invention relates to specific single nucleotide polymorphisms (SNPs) in the human genome, or combinations of such SNPs, and their association with liver fibrosis and related pathologies. Based on differences in allele frequencies in the patient population with advanced or bridging fibrosis/cirrhosis relative to individuals with no or minimal fibrosis, the naturally-occurring SNPs disclosed herein can be used as targets for the design of diagnostic reagents and the development of therapeutic agents, as well as for disease association and linkage analysis. In particular, the SNPs of the present invention are useful for identifying an individual who is at an increased or decreased risk of developing liver fibrosis and for early detection of the disease, for providing clinically important information for the prevention and/or treatment of liver fibrosis, and for screening and selecting therapeutic agents. The SNPs disclosed herein are also useful for human identification applications. Methods, assays, kits, and reagents for detecting the presence of these polymorphisms and their encoded products are provided.

### BACKGROUND OF THE INVENTION

[0003] Fibrosis is a quantitative and qualitative change in the extracellular matrix that surrounds cells as a response to tissue injury. The trauma that generates fibrosis is varied and includes radiological trauma (i.e., x-ray, gamma ray, etc.), chemical trauma (ie., radicals, ethanol, phenols, etc.) viral infection and physical trauma. Fibrosis encompasses pathological conditions in a variety of tissues such as pulmonary fibrosis, retroperitoneal fibrosis, epidural fibrosis, congenital fibrosis, focal fibrosis, muscle fibrosis, massive fibrosis, radiation fibrosis (e.g. radiation induced lung fibrosis), liver fibrosis and cardiac fibrosis.

[0004] Liver Fibrosis in HCV-Infected Subjects

[0005] HCV affects about 4 million people in the United States and more than 170 million people worldwide. Approximately 85% of the infected individuals develop chronic hepatitis, and up to 20% progress to bridging fibrosis/cirrhosis, which is end-stage severe liver fibrosis and is generally irreversible (Lauer et al. 2001, N Eng J Med 345: 41-52). HCV infection is the major cause of cirrhosis and hepatocellular carcinoma (HCC), and accounts for one third of liver transplantations. The interval between infection and the development of cirrhosis may exceed 30 years but varies widely among individuals. Based on fibrosis progression rate, chronic HCV patients can be roughly divided into three groups (Poynard et al 1997, Lancet 349: 825-832): rapid, median, and slow fibroses.

[0006] Previous studies have indicated that host factors may play a role in the progression of fibrosis, and these include age at infection, duration of infection, alcohol consumption, and gender. However, these host factors account for only 17%-29% of the variability in fibrosis progression (Poynard et al., 1997, Lancet 349: 825-832; Wright et al Gut. 2003, 52(4):574-9). Viral load or viral genotype has not shown significant correlation with fibrosis progression (Poynard et al., 1997, Lancet 349: 825-832). Thus, other factors, such as host genetic factors, are likely to play an important role in determining the rate of fibrosis progression.

[0007] Recent studies suggest that some genetic polymorphisms influence the progression of fibrosis in patients with HCV infection (Powell et al. Hepatology 31(4): 828-33, 2000), autoimmune chronic cholestasis (Tanaka et al. J. Infec. Dis. 187:1822-5, 2003), alcohol induced liver diseases (Yamauchi et al., J. Hepatology 23(5):519-23, 1995), and nonalcoholic fatty liver diseases (Bernard et al. Diabetologia 2000, 43(8):995-9). However, none of these genetic polymorphisms have been integrated into clinical practice for various reasons (Bataller et al Hepatology. 2003, 37(3):493-503). For example, limitations in study design, such as small study populations, lack of replication sample sets, and lack of proper control groups have contributed to contradictory results; an example being the conflicting results reported on the role of mutations in the hemochromatosis gene (HFE) on fibrosis progression in HCV-infected patients (Smith et al., Hepatology. 1998, 27(6):1695-9; Thorburn et al., Gut. 2002, 50(2):248-52).

[0008] Currently, there is no diagnostic test that can identify patients who are predisposed to developing liver damage from chronic HCV infection, despite the large variability in fibrosis progression rate among HCV patients. Furthermore, diagnosis of fibrosis stage (early, middle or late) and monitoring of fibrosis progression is currently accomplished by liver biopsy, which is invasive, painful, and costly, and generally must be performed multiple times to assess fibrosis status. The discovery of genetic markers which are useful in identifying HCV-infected individuals who are at increased risk for advancing from early stage fibrosis to cirrhosis and/or HCC may lead to, for example, better therapeutic strategies, economic models, and health care policy decisions.

[0009] SNPs

[0010] The genomes of all organisms undergo spontaneous mutation in the course of their continuing evolution, generating variant forms of progenitor genetic sequences (Gusella, Ann. Rev. Biochem. 55, 831-854 (1986)). A variant form may confer an evolutionary advantage or disadvantage relative to a progenitor form or may be neutral. In some instances, a variant form confers an evolutionary advantage to the species and is eventually incorporated into the DNA of many or most members of the species and effectively becomes the progenitor form. Additionally, the effects of a variant form may be both beneficial and detrimental, depending on the circumstances. For example, a heterozygous sickle cell mutation confers resistance to malaria, but a homozygous sickle cell mutation is usually lethal. In many cases, both progenitor and variant forms survive and co-exist in a species population. The coexistence of multiple forms of a genetic sequence gives rise to genetic polymorphisms, including SNPs.

[0011] Approximately 90% of all polymorphisms in the human genome are SNPs. SNPs are single base positions in DNA at which different alleles, or alternative nucleotides, exist in a population. The SNP position (interchangeably referred to herein as SNP, SNP site, SNP locus, SNP marker, or marker) is usually preceded by and followed by highly conserved sequences of the allele (e.g., sequences that vary in less than 1/100 or 1/1000 members of the populations). An individual may be homozygous or heterozygous for an allele at each SNP position. A SNP can, in some instances, be referred to as a “cSNP” to denote that the nucleotide sequence containing the SNP is an amino acid coding sequence.

[0012] A SNP may arise from a substitution of one nucleotide for another at the polymorphic site. Substitutions can be transitions or transversions. A transition is the replacement of one purine nucleotide by another purine nucleotide, or one pyrimidine by another pyrimidine. A transversion is the replacement of a purine by a pyrimidine, or vice versa. A SNP may also be a single base insertion or deletion variant referred to as an “indel” (Weber et al., “Human diallelic insertion/deletion polymorphisms”, Am J Hum Genet 2002 October; 71(4):854-62).

[0013] A synonymous codon change, or silent mutation/SNP (terms such as “SNP”, “polymorphism”, “mutation”, “mutant”, “variation”, and “variant” are used herein interchangeably), is one that does not result in a change of amino acid due to the degeneracy of the genetic code. A substitution that changes a codon coding for one amino acid to a codon coding for a different amino acid (i.e., a non-synonymous codon change) is referred to as a missense mutation. A nonsense mutation results in a type of non-synonymous codon change in which a stop codon is formed, thereby leading to premature termination of a polypeptide chain and a truncated protein. A read-through mutation is another type of non-synonymous codon change that causes the destruction of a stop codon, thereby resulting in an extended polypeptide product. While SNPs can be bi-, tri-, or tetra-allelic, the vast majority of the SNPs are bi-allelic, and are thus often referred to as “bi-allelic markers”, or “di-allelic markers”.

[0014] As used herein, references to SNPs and SNP genotypes include individual SNPs and/or haplotypes, which are groups of SNPs that are generally inherited together. Haplotypes can have stronger correlations with diseases or other phenotypic effects compared with individual SNPs, and therefore may provide increased diagnostic accuracy in some cases (Stephens et al. Science 293, 489-493, 20 Jul. 2001).

[0015] Causative SNPs are those SNPs that produce alterations in gene expression or in the expression, structure, and/or function of a gene product, and therefore are most predictive of a possible clinical phenotype. One such class includes SNPs falling within regions of genes encoding a polypeptide product, i.e. cSNPs. These SNPs may result in an alteration of the amino acid sequence of the polypeptide product (i.e., non-synonymous codon changes) and give rise to the expression of a defective or other variant protein. Furthermore, in the case of nonsense mutations, a SNP may lead to premature termination of a polypeptide product. Such variant products can result in a pathological condition, e.g., genetic disease. Examples of genes in which a SNP within a coding sequence causes a genetic disease include sickle cell anemia and cystic fibrosis.

[0016] Causative SNPs do not necessarily have to occur in coding regions; causative SNPs can occur in, for example, any genetic region that can ultimately affect the expression, structure, and/or activity of the protein encoded by a nucleic acid. Such genetic regions include, for example, those involved in transcription, such as SNPs in transcription factor binding domains, SNPs in promoter regions, in areas involved in transcript processing, such as SNPs at intron-exon boundaries that may cause defective splicing, or SNPs in mRNA processing signal sequences such as polyadenylation signal regions. Some SNPs that are not causative SNPs nevertheless are in close association with, and therefore segregate with, a disease-causing sequence In this situation, the presence of a SNP correlates with the presence of, or predisposition to, or an increased risk in developing the disease. These SNPs, although not causative, are nonetheless also useful for diagnostics, disease predisposition screening, and other uses.

[0017] An association study of a SNP and a specific disorder involves determining the presence or frequency of the SNP allele in biological samples from individuals with the disorder of interest, such as liver fibrosis and related pathologies and comparing the information to that of controls (i.e., individuals who do not have the disorder; controls may be also referred to as “healthy” or “normal” individuals) who are preferably of similar age and race. The appropriate selection of patients and controls is important to the success of SNP association studies. Therefore, a pool of individuals with well-characterized phenotypes is extremely desirable.

[0018] A SNP may be screened in diseased tissue samples or any biological sample obtained from a diseased individual, and compared to control samples, and selected for its increased (or decreased) occurrence in a specific pathological condition, such as pathologies related to liver fibrosis, increased or decreased risk of developing bridging fibrosis/cirrhosis, and progression of liver fibrosis. Once a statistically significant association is established between one or more SNP(s) and a pathological condition (or other phenotype) of interest, then the region around the SNP can optionally be thoroughly screened to identify the causative genetic locus/sequence(s) (e.g., causative SNP/mutation, gene, regulatory region, etc.) that influences the pathological condition or phenotype. Association studies may be conducted within the general population and are not limited to studies performed on related individuals in affected families (linkage studies).

[0019] Clinical trials have shown that patient response to treatment with pharmaceuticals is often heterogeneous. There is a continuing need to improve pharmaceutical agent design and therapy. In that regard, SNPs can be used to identify patients most suited to therapy with particular pharmaceutical agents (this is often termed “pharmacogenomics”). Similarly, SNPs can be used to exclude patients from certain treatment due to the patient's increased likelihood of developing toxic side effects or their likelihood of not responding to the treatment. Pharmacogenomics can also be used in pharmaceutical research to assist the drug development and selection process. (Linder et al. (1997), Clinical Chemistry, 43, 254; Marshall (1997), Nature Biotechnology, 15, 1249; International Patent Application WO 97/40462, Spectra Biomedical; and Schafer et al. (1998), Nature Biotechnology, 16: 3).

### SUMMARY OF THE INVENTION

[0020] The present invention relates to the identification of novel SNPs, unique combinations of such SNPs, and haplotypes of SNPs that are associated with liver fibrosis and in particular the increased or decreased risk of developing bridging fibrosis/cirrhosis, and the rate of progression of liver fibrosis. The polymorphisms disclosed herein are directly useful as targets for the design of diagnostic reagents and the development of therapeutic agents for use in the diagnosis and treatment of liver fibrosis and related pathologies.

[0021] Based on the identification of SNPs associated with liver fibrosis, the present invention also provides methods of detecting these variants as well as the design and preparation of detection reagents needed to accomplish this task. The invention specifically provides, for example, novel SNPs in genetic sequences involved in liver fibrosis and related pathologies, isolated nucleic acid molecules (including, for example, DNA and RNA molecules) containing these SNPs, variant proteins encoded by nucleic acid molecules containing such SNPs, antibodies to the encoded variant proteins, computer-based and data storage systems containing the novel SNP information, methods of detecting these SNPs in a test sample, methods of identifying individuals who have an altered (i.e., increased or decreased) risk of developing liver fibrosis based on the presence or absence of one or more particular nucleotides (alleles) at one or more SNP sites disclosed herein or the detection of one or more encoded variant products (e.g., variant mRNA transcripts or variant proteins), methods of identifying individuals who are more or less likely to respond to a treatment (or more or less likely to experience undesirable side effects from a treatment, etc.), methods of screening for compounds useful in the treatment of a disorder associated with a variant gene/protein, compounds identified by these methods, methods of treating disorders mediated by a variant gene/protein, methods of using the novel SNPs of the present invention for human identification, etc.

[0022] In Tables 1-2, the present invention provides gene information, transcript sequences (SEQ ID NOS:1-15), encoded amino acid sequences (SEQ ID NOS:16-30), genomic sequences (SEQ ID NOS:46-56), transcript-based context sequences (SEQ ID NOS:31-45) and genomic-based context sequences (SEQ ID NOS:57-72) that contain the SNPs of the present invention, and extensive SNP information that includes observed alleles, allele frequencies, populations/ethnic groups in which alleles have been observed, information about the type of SNP and corresponding functional effect, and, for cSNPs, information about the encoded polypeptide product. The transcript sequences (SEQ ID NOS:1-15), amino acid sequences (SEQ ID NOS:16-30), genomic sequences (SEQ ID NOS:46-56), transcript-based SNP context sequences (SEQ ID NOS: 31-45), and genomic-based SNP context sequences (SEQ ID NOS:57-72) are also provided in the Sequence Listing. The Sequence Listing also provides the Primer Sequences (SEQ ID NOS:73-93).

[0023] In a specific embodiment of the present invention, SNPs that occur naturally in the human genome are provided as isolated nucleic acid molecules. These SNPs are associated with liver fibrosis and related pathologies. In particular the SNPs are associated with either an increased or decreased risk of developing bridging fibrosis/cirrhosis and affect the rate of progression of liver fibrosis. As such, they can have a variety of uses in the diagnosis and/or treatment of liver fibrosis and related pathologies. One aspect of the present invention relates to an isolated nucleic acid molecule comprising a nucleotide sequence in which at least one nucleotide is a SNP disclosed in Tables 3 and/or 4. For example, such isolated nucleic acid molecule can be SEQ ID NO: 60, or SEQ ID NO: 49, in which SNP hCV25635059 can be found. In an alternative embodiment, a nucleic acid of the invention is an amplified polynucleotide, which is produced by amplification of a SNP-containing nucleic acid template. In another embodiment, the invention provides for a variant protein that is encoded by a nucleic acid molecule containing a SNP disclosed herein.

[0024] In yet another embodiment of the invention, a reagent for detecting a SNP in the context of its naturally-occurring flanking nucleotide sequences (which can be, e.g., either DNA or mRNA) is provided. In particular, such a reagent may be in the form of, for example, a hybridization probe or an amplification primer that is useful in the specific detection of a SNP of interest. In an alternative embodiment, a protein detection reagent is used to detect a variant protein that is encoded by a nucleic acid molecule containing a SNP disclosed herein. A preferred embodiment of a protein detection reagent is an antibody or an antigen-reactive antibody fragment.

[0025] Various embodiments of the invention also provide kits comprising SNP detection reagents, and methods for detecting the SNPs disclosed herein by employing detection reagents. In a specific embodiment, the present invention provides for a method of identifying a human having an altered (increased or decreased) risk of developing liver fibrosis by detecting the presence or absence of one or more SNP alleles disclosed herein in said human's nucleic acids wherein the presence of the SNP is indicative of an altered risk for developing liver fibrosis in said human. In another embodiment, a method for diagnosis of liver fibrosis and related pathologies by detecting the presence or absence of one or more SNP alleles disclosed herein is provided.

[0026] The nucleic acid molecules of the invention can be inserted in an expression vector, such as to produce a variant protein in a host cell. Thus, the present invention also provides for a vector comprising a SNP-containing nucleic acid molecule, genetically-engineered host cells containing the vector, and methods for expressing a recombinant variant protein using such host cells. In another specific embodiment, the host cells, SNP-containing nucleic acid molecules, and/or variant proteins can be used as targets in a method for screening and identifying therapeutic agents or pharmaceutical compounds useful in the treatment of liver fibrosis and related pathologies.

[0027] An aspect of this invention is a method for treating liver fibrosis in a human subject wherein said human subject harbors a SNP, gene, transcript, and/or encoded protein identified in Tables 1-2, which method comprises administering to said human subject a therapeutically or prophylactically effective amount of one or more agents counteracting the effects of the disease, such as by inhibiting (or stimulating) the activity of the gene, transcript, and/or encoded protein identified in Tables 1-2.

[0028] Another aspect of this invention is a method for identifying an agent useful in therapeutically or prophylactically treating liver fibrosis and related pathologies in a human subject wherein said human subject harbors a SNP, gene, transcript, and/or encoded protein identified in Tables 1-2, which method comprises contacting the gene, transcript, or encoded protein with a candidate agent under conditions suitable to allow formation of a binding complex between the gene, transcript, or encoded protein and the candidate agent and detecting the formation of the binding complex, wherein the presence of the complex identifies said agent.

[0029] Another aspect of this invention is a method for treating liver fibrosis and related pathologies in a human subject, which method comprises:

[0030] (i) determining that said human subject harbors a SNP, gene, transcript, and/or encoded protein identified in Tables 1-2, and

[0031] (ii) administering to said subject a therapeutically or prophylactically effective amount of one or more agents counteracting the effects of the disease.

[0032] Yet another aspect of this invention is a method for evaluating the suitability of a patient for HCV treatment comprising determining the genotype of said patient with respect to a particular set of SNP markers, said SNP markers comprising a plurality of individual SNPs ranging from two to seven SNPs in Table 1 or Table 2, and calculating a score using an appropriate algorithm based on the genotype of said patient, the resulting score being indicative of the suitability of said patient undergoing HCV treatment.

[0033] Another aspect of the invention is a method of treating an HCV patient comprising administering an appropriate drug such as interferon, or interferon and ribavirin, in a therapeutically effective amount to said HCV patient whose genotype has been shown to contain a SNP, or a plurality of SNPs as described in Table 1, 2, 11, 12, and 22.

[0034] Many other uses and advantages of the present invention will be apparent to those skilled in the art upon review of the detailed description of the preferred embodiments herein. Solely for clarity of discussion, the invention is described in the sections below by way of non-limiting examples.

### DESCRIPTION OF THE TEXT (ASCII) FILES SUBMITTED ELECTRONICALLY VIA EFS-WEB

[0035] The following five text (ASCII) files are submitted electronically via EFS-Web as part of the instant application:

[0036] 1) File CD000006ORD_SEQLIST.txt provides the Sequence Listing. The Sequence Listing provides the transcript sequences (SEQ ID NOS:1-15) and protein sequences (SEQ ID NOS:16-30) as shown in Table 1, and genomic sequences (SEQ ID NOS:46-56) as shown in Table 2, for each liver fibrosis-associated gene that contains one or more SNPs of the present invention. Also provided in the Sequence Listing are context sequences flanking each SNP, including both transcript-based context sequences as shown in Table 1 (SEQ ID NOS:31-45) and genomic-based context sequences as shown in Table 2 (SEQ ID NOS:57-72). The context sequences generally provide 100 bp upstream (5′) and 100 bp downstream (3′) of each SNP, with the SNP in the middle of the context sequence, for a total of 200 bp of context sequence surrounding each SNP. File CD000006ORD_SEQLIST.txt is 1,297 KB in size, and was created on Apr. 26, 2007.

[0037] 2) File CD000006ORD_Table1.txt provides Table 1. File CD000006ORD_Table1.txt is 21 KB in size, and was created on Apr. 26, 2007.

[0038] 3) File CD000006ORD_Table2.txt provides Table 2. File CD000006ORD_Table2.txt is 15 KB in size, and was created on Apr. 26, 2007.

[0039] 4) File CD000006ORD_Table3.txt provides Table 3. File CD000006ORD_Table3.txt is 1 KB in size, and was created on Apr. 26, 2007.

[0040] 5) File CD000006ORD_Table4.txt provides Table 4. File CD000006ORD_Table4.txt is 1 KB in size, and was created on Apr. 26, 2007.

TABLES
The patent application contains table(s) that have been included at the end of the specification.

### DESCRIPTION OF TABLE 1 AND TABLE 2

[0041] Table 1 and Table 2 disclose the SNP and associated gene/transcript/protein information of the present invention. For each gene, Table 1 and Table 2 each provide a header containing gene/transcript/protein information, followed by a transcript and protein sequence (in Table 1) or genomic sequence (in Table 2), and then SNP information regarding each SNP found in that gene/transcript.

[0042] NOTE: SNPs may be included in both Table 1 and Table 2; Table 1 presents the SNPs relative to their transcript sequences and encoded protein sequences, whereas Table 2 presents the SNPs relative to their genomic sequences (in some instances Table 2 may also include, after the last gene sequence, genomic sequences of one or more intergenic regions, as well as SNP context sequences and other SNP information for any SNPs that lie within these intergenic regions). SNPs can readily be cross-referenced between Tables based on their hCV (or, in some instances, hDV) identification numbers.

[0043] The gene/transcript/protein information includes:
[0044] a gene number (1 through n, where n=the total number of genes in the Table)
[0045] a Celera hCG and UID internal identification numbers for the gene
[0046] a Celera hCT and UID internal identification numbers for the transcript (Table 1 only)
[0047] a public Genbank accession number (e.g., RefSeq NM number) for the transcript (Table 1 only)
[0048] a Celera hCP and UID internal identification numbers for the protein encoded by the hCT transcript (Table 1 only)
[0049] a public Genbank accession number (e.g., RefSeq NP number) for the protein (Table 1 only)
[0050] an art-known gene symbol
[0051] an art-known gene/protein name
[0052] Celera genomic axis position (indicating start nucleotide position-stop nucleotide position)
[0053] the chromosome number of the chromosome on which the gene is located
[0054] an OMIM (Online Mendelian Inheritance in Man; Johns Hopkins University/NCBI) public reference number for obtaining further information regarding the medical significance of each gene
[0055] alternative gene/protein name(s) and/or symbol(s) in the OMIM entry

[0056] NOTE: Due to the presence of alternative splice forms, multiple transcript/protein entries can be provided for a single gene entry in Table 1; i.e., for a single Gene Number, multiple entries may be provided in series that differ in their transcript/protein information and sequences.

[0057] Following the gene/transcript/protein information is a transcript sequence and protein sequence (in Table 1), or a genomic sequence (in Table 2), for each gene, as follows:
[0058] transcript sequence (Table 1 only) (corresponding to SEQ ID NOS:1-15 of the Sequence Listing), with SNPs identified by their IUB codes (transcript sequences can include 5′ UTR, protein coding, and 3′ UTR regions). (NOTE: If there are differences between the nucleotide sequence of the hCT transcript and the corresponding public transcript sequence identified by the Genbank accession number, the hCT transcript sequence (and encoded protein) is provided, unless the public sequence is a RefSeq transcript sequence identified by an NM number, in which case the RefSeq NM transcript sequence (and encoded protein) is provided. However, whether the hCT transcript or RefSeq NM transcript is used as the transcript sequence, the disclosed SNPs are represented by their IUB codes within the transcript.)
[0059] the encoded protein sequence (Table 1 only) (corresponding to SEQ ID NOS:16-30 of the Sequence Listing)
[0060] the genomic sequence of the gene (Table 2 only), including 6 kb on each side of the gene boundaries (i.e., 6 kb on the 5′ side of the gene plus 6 kb on the 3′ side of the gene) (corresponding to SEQ ID NOS:46-56 of the Sequence Listing).

[0061] After the last gene sequence, Table 2 may include additional genomic sequences of intergenic regions (in such instances, these sequences are identified as “Intergenic region:” followed by a numerical identification number), as well as SNP context sequences and other SNP information for any SNPs that lie within each intergenic region (and such SNPs are identified as “INTERGENIC” for SNP type).

[0062] NOTE: The transcript, protein, and transcript-based SNP context sequences are provided in both Table 1 and in the Sequence Listing. The genomic and genomic-based SNP context sequences are provided in both Table 2 and in the Sequence Listing. SEQ ID NOS are indicated in Table 1 for each transcript sequence (SEQ ID NOS:1-15), protein sequence (SEQ ID NOS:16-30), and transcript-based SNP context sequence (SEQ ID NOS:31-45), and SEQ ID NOS are indicated in Table 2 for each genomic sequence (SEQ ID NOS:46-56), and genomic-based SNP context sequence (SEQ ID NOS:57-72).

[0063] The SNP information includes:
[0064] context sequence (taken from the transcript sequence in Table 1, and taken from the genomic sequence in Table 2) with the SNP represented by its IUB code, including 100 bp upstream (5′) of the SNP position plus 100 bp downstream (3′) of the SNP position (the transcript-based SNP context sequences in Table 1 are provided in the Sequence Listing as SEQ ID NOS:31-45; the genomic-based SNP context sequences in Table 2 are provided in the Sequence Listing as SEQ ID NOS:57-72).
[0065] Celera hCV internal identification number for the SNP (in some instances, an “hDV” number is given instead of an “hCV” number)
[0066] SNP position [position of the SNP within the given transcript sequence (Table 1) or within the given genomic sequence (Table 2)]
[0067] SNP source (may include any combination of one or more of the following five codes, depending on which internal sequencing projects and/or public databases the SNP has been observed in: “Applera”=SNP observed during the re-sequencing of genes and regulatory regions of 39 individuals, “Celera”=SNP observed during shotgun sequencing and assembly of the Celera human genome sequence, “Celera Diagnostics”=SNP observed during re-sequencing of nucleic acid samples from individuals who have a disease, “dbSNP”=SNP observed in the dbSNP public database, “HGBASE”=SNP observed in the HGBASE public database, “HGMD”=SNP observed in the Human Gene Mutation Database (HGMD) public database, “HapMap”=SNP observed in the International HapMap Project public database, “CSNP”=SNP observed in an internal Applied Biosystems (Foster City, Calif.) database of coding SNPS (cSNPs)) (NOTE: multiple “Applera” source entries for a single SNP indicate that the same SNP was covered by multiple overlapping amplification products and the re-sequencing results (e.g., observed allele counts) from each of these amplification products is being provided)
[0068] Population/allele/allele count information in the format of [population1(first_allele,count|second_allele,count)population2(first_allele,count|second_allele,count) total (first_allele,total count|second_allele,total count)]. The information in this field includes populations/ethnic groups in which particular SNP alleles have been observed (“cau”=Caucasian, “his”=Hispanic, “chn”=Chinese, and “afr”=African-American, “jpn”=Japanese, “ind”=Indian, “mex”=Mexican, “ain”=“American Indian, “cra”=Celera donor, “no_pop”=no population information available), identified SNP alleles, and observed allele counts (within each population group and total allele counts), where available [“-” in the allele field represents a deletion allele of an insertion/deletion (“indel”) polymorphism (in which case the corresponding insertion allele, which may be comprised of one or more nucleotides, is indicated in the allele field on the opposite side of the “I”); “-” in the count field indicates that allele count information is not available]. For certain SNPs from the public dbSNP database, population/ethnic information is indicated as follows (this population information is publicly available in dbSNP): “HISP1”=human individual DNA (anonymized samples) from 23 individuals of self-described HISPANIC heritage; “PAC1”=human individual DNA (anonymized samples) from 24 individuals of self-described PACIFIC RIM heritage; “CAUC1”=human individual DNA (anonymized samples) from 31 individuals of self-described CAUCASIAN heritage; “AFR1”=human individual DNA (anonymized samples) from 24 individuals of self-described AFRICAN/AFRICAN AMERICAN heritage; “P1”=human individual DNA (anonymized samples) from 102 individuals of self-described heritage; “PA130299515”; “SC_{—}12_A”=SANGER 12 DNAs of Asian origin from Corielle cell repositories, 6 of which are male and 6 female; “SC_{—}12_C”=SANGER 12 DNAs of Caucasian origin from Corielle cell repositories from the CEPH/UTAH library. Six male and 6 female; “SC_{—}12_AA”=SANGER 12 DNAs of African-American origin from Corielle cell repositories 6 of which are male and 6 female; “SC_{—}95_C”=SANGER 95 DNAs of Caucasian origin from Corielle cell repositories from the CEPH/UTAH library; and “SC_{—}12_CA”=Caucasians—12 DNAs from Corielle cell repositories that are from the CEPH/UTAH library. Six male and 6 female.

[0069] NOTE: For SNPs of “Applera” SNP source, genes/regulatory regions of 39 individuals (20 Caucasians and 19 African Americans) were re-sequenced and, since each SNP position is represented by two chromosomes in each individual (with the exception of SNPs on X and Y chromosomes in males, for which each SNP position is represented by a single chromosome), up to 78 chromosomes were genotyped for each SNP position. Thus, the sum of the African-American (“afr”) allele counts is up to 38, the sum of the Caucasian allele counts (“cau”) is up to 40, and the total sum of all allele counts is up to 78.

[0070] (NOTE: semicolons separate population/allele/count information corresponding to each indicated SNP source; i.e., if four SNP sources are indicated, such as “Celera”, “dbSNP”, “HGBASE”, and “HGMD”, then population/allele/count information is provided in four groups which are separated by semicolons and listed in the same order as the listing of SNP sources, with each population/allele/count information group corresponding to the respective SNP source based on order; thus, in this example, the first population/allele/count information group would correspond to the first listed SNP source (Celera) and the third population/allele/count information group separated by semicolons would correspond to the third listed SNP source (HGBASE); if population/allele/count information is not available for any particular SNP source, then a pair of semicolons is still inserted as a place-holder in order to maintain correspondence between the list of SNP sources and the corresponding listing of population/allele/count information)
[0071] SNP type (e.g., location within gene/transcript and/or predicted functional effect) [“MISSENSE MUTATION”=SNP causes a change in the encoded amino acid (i.e., a non-synonymous coding SNP); “SILENT MUTATION”=SNP does not cause a change in the encoded amino acid (i.e., a synonymous coding SNP); “STOP CODON MUTATION”=SNP is located in a stop codon; “NONSENSE MUTATION”=SNP creates or destroys a stop codon; “UTR 5”=SNP is located in a 5′ UTR of a transcript; “UTR 3”=SNP is located in a 3′ UTR of a transcript; “PUTATIVE UTR 5”=SNP is located in a putative 5′ UTR; “PUTATIVE UTR 3”=SNP is located in a putative 3′ UTR; “DONOR SPLICE SITE”=SNP is located in a donor splice site (5′ intron boundary); “ACCEPTOR SPLICE SITE”=SNP is located in an acceptor splice site (3′ intron boundary); “CODING REGION”=SNP is located in a protein-coding region of the transcript; “EXON”=SNP is located in an exon; “INTRON”=SNP is located in an intron; “hmCS”=SNP is located in a human-mouse conserved segment; “TFBS”=SNP is located in a transcription factor binding site; “UNKNOWN”=SNP type is not defined; “INTERGENIC”=SNP is intergenic, i.e., outside of any gene boundary]
[0072] Protein coding information (Table 1 only), where relevant, in the format of [protein SEQ ID NO:#, amino acid position, (amino acid-1, codon1) (amino acid-2, codon2)]. The information in this field includes SEQ ID NO of the encoded protein sequence, position of the amino acid residue within the protein identified by the SEQ ID NO that is encoded by the codon containing the SNP, amino acids (represented by one-letter amino acid codes) that are encoded by the alternative SNP alleles (in the case of stop codons, “X” is used for the one-letter amino acid code), and alternative codons containing the alternative SNP nucleotides which encode the amino acid residues (thus, for example, for missense mutation-type SNPs, at least two different amino acids and at least two different codons are generally indicated; for silent mutation-type SNPs, one amino acid and at least two different codons are generally indicated, etc.). In instances where the SNP is located outside of a protein-coding region (e.g., in a UTR region), “None” is indicated following the protein SEQ ID NO.

### DESCRIPTION OF TABLE 3 AND TABLE 4

[0073] Tables 3 and 4 provide a list of a subset of SNPs from Table 1 (in the case of Table 3) or Table 2 (in the case of Table 4) for which the SNP source falls into one of the following three categories: 1) SNPs for which the SNP source is only “Applera” and none other, 2) SNPs for which the SNP source is only “Celera” and none other, and 3) SNPs for which the SNP source is both “Applera” and “Celera” but none other.

[0074] These SNPs have not been observed in any of the public databases (dbSNP, HGBASE, and HGMD), and were also not observed during shotgun sequencing and assembly of the Celera human genome sequence (i.e., “Celera” SNP source). Tables 3 and 4 provide the hCV identification number (or hDV identification number for SNPs having “Celera” SNP source) and the SEQ ID NO of the context sequence for each of these SNPs.

### DESCRIPTION OF THE FIGURES

[0075] FIG. 1 provides a diagrammatic representation of the final signature selection. Training AUC, Model Robustness and 1/(Number of markers) are plotted as a function of CV fold frequency threshold. In the figure, N denotes the number of markers in the selected model at each threshold value. Signature selected by sequentially reducing the number of markers available for marker selection while increasing the robustness of the markers.

[0076] FIG. 2A provides a diagrammatic representation of the steps that are involved in building the CRS signature. Markers are ranked using 50 repeated ten fold cross validation (10×CV) experiments (see FIG. 2B) and an iterative technique as shown in the flow chart block on the right is used to select the final signature.

[0077] FIG. 2B provides a diagrammatic representation of the cross validation steps involved in building the CRS signature.

[0078] FIGS. 3A, 3B, 3C, and 3D show the overall performance of CRS and in conjunction with clinical factors.

[0079] FIG. 4 shows the CRS is a reliable predictor for absolute Cirrhosis risk and fibrosis rate.

[0080] FIG. 5 provides a diagrammatic representation of the clinical implications of the CRS.

[0081] FIG. 6 provides a comparison chart of three different approaches, demonstrating the diagnostic utility of CRS-7 signature.

### DETAILED DESCRIPTION OF THE INVENTION

[0082] The present invention provides SNPs associated with liver fibrosis and related pathologies, nucleic acid molecules containing SNPs, methods and reagents for the detection of the SNPs disclosed herein, uses of these SNPs for the development of detection reagents, and assays or kits that utilize such reagents. The liver fibrosis-associated SNPs disclosed herein are useful for diagnosing, screening for, and evaluating predisposition to liver fibrosis, including an increased or decreased risk of developing bridging fibrosis/cirrhosis, the rate of progression of fibrosis, and related pathologies in humans. Furthermore, such SNPs and their encoded products are useful targets for the development of therapeutic agents.

[0083] A large number of SNPs have been identified from re-sequencing DNA from 39 individuals, and they are indicated as “Applera” SNP source in Tables 1-2. Their allele frequencies observed in each of the Caucasian and African-American ethnic groups are provided. Additional SNPs included herein were previously identified during shotgun sequencing and assembly of the human genome, and they are indicated as “Celera” SNP source in Tables 1-2. Furthermore, the information provided in Table 1-2, particularly the allele frequency information obtained from 39 individuals and the identification of the precise position of each SNP within each gene/transcript, allows haplotypes (i.e., groups of SNPs that are co-inherited) to be readily inferred. The present invention encompasses SNP haplotypes, as well as individual SNPs.

[0084] Thus, the present invention provides individual SNPs associated with liver fibrosis, as well as combinations of SNPs and haplotypes in genetic regions associated with liver fibrosis, polymorphic/variant transcript sequences (SEQ ID NOS:1-15) and genomic sequences (SEQ ID NOS:46-56) containing SNPs, encoded amino acid sequences (SEQ ID NOS: 16-30), and both transcript-based SNP context sequences (SEQ ID NOS: 31-45) and genomic-based SNP context sequences (SEQ ID NOS:57-72) (transcript sequences, protein sequences, and transcript-based SNP context sequences are provided in Table 1 and the Sequence Listing; genomic sequences and genomic-based SNP context sequences are provided in Table 2 and the Sequence Listing), methods of detecting these polymorphisms in a test sample, methods of determining the risk of an individual of having or developing liver fibrosis, methods of screening for compounds useful for treating disorders associated with a variant gene/protein such as liver fibrosis, compounds identified by these screening methods, methods of using the disclosed SNPs to select a treatment strategy, methods of treating a disorder associated with a variant gene/protein (i.e., therapeutic methods), and methods of using the SNPs of the present invention for human identification.

[0085] The present invention provides novel SNPs associated with liver fibrosis and related pathologies, as well as SNPs that were previously known in the art, but were not previously known to be associated with liver fibrosis. Accordingly, the present invention provides novel compositions and methods based on the novel SNPs disclosed herein, and also provides novel methods of using the known, but previously unassociated, SNPs in methods relating to liver fibrosis (e.g., for diagnosing liver fibrosis, etc.). In Tables 1-2, known SNPs are identified based on the public database in which they have been observed, which is indicated as one or more of the following SNP types: “dbSNP”=SNP observed in dbSNP, “HGBASE”=SNP observed in HGBASE, and “HGMD”=SNP observed in the Human Gene Mutation Database (HGMD). Novel SNPs for which the SNP source is only “Applera” and none other, i.e., those that have not been observed in any public databases and which were also not observed during shotgun sequencing and assembly of the Celera human genome sequence (i.e., “Celera” SNP source), are indicated in Tables 3-4.

[0086] Particular SNP alleles of the present invention can be associated with either an increased risk of having or developing liver fibrosis and related pathologies, or a decreased risk of having or developing liver fibrosis. SNP alleles that are associated with a decreased risk of having or developing liver fibrosis may be referred to as “protective” alleles, and SNP alleles that are associated with an increased risk of having or developing liver fibrosis may be referred to as “susceptibility” alleles, “risk” alleles, or “risk factors”. Thus, whereas certain SNPs (or their encoded products) can be assayed to determine whether an individual possesses a SNP allele that is indicative of an increased risk of having or developing liver fibrosis (i.e., a susceptibility allele), other SNPs (or their encoded products) can be assayed to determine whether an individual possesses a SNP allele that is indicative of a decreased risk of having or developing liver fibrosis (i.e., a protective allele). Similarly, particular SNP alleles of the present invention can be associated with either an increased or decreased likelihood of responding to a particular treatment or therapeutic compound, or an increased or decreased likelihood of experiencing toxic effects from a particular treatment or therapeutic compound. The term “altered” may be used herein to encompass either of these two possibilities (e.g., an increased or a decreased risk/likelihood).

[0087] Those skilled in the art will readily recognize that nucleic acid molecules may be double-stranded molecules and that reference to a particular site on one strand refers, as well, to the corresponding site on a complementary strand. In defining a SNP position, SNP allele, or nucleotide sequence, reference to an adenine, a thymine (uridine), a cytosine, or a guanine at a particular site on one strand of a nucleic acid molecule also defines the thymine (uridine), adenine, guanine, or cytosine (respectively) at the corresponding site on a complementary strand of the nucleic acid molecule. Thus, reference may be made to either strand in order to refer to a particular SNP position, SNP allele, or nucleotide sequence. Probes and primers, may be designed to hybridize to either strand and SNP genotyping methods disclosed herein may generally target either strand. Throughout the specification, in identifying a SNP position, reference is generally made to the protein-encoding strand, only for the purpose of convenience.

[0088] References to variant peptides, polypeptides, or proteins of the present invention include peptides, polypeptides, proteins, or fragments thereof, that contain at least one amino acid residue that differs from the corresponding amino acid sequence of the art-known peptide/polypeptide/protein (the art-known protein may be interchangeably referred to as the “wild-type”, “reference”, or “normal” protein). Such variant peptides/polypeptides/proteins can result from a codon change caused by a nonsynonymous nucleotide substitution at a protein-coding SNP position (i.e., a missense mutation) disclosed by the present invention. Variant peptides/polypeptides/proteins of the present invention can also result from a nonsense mutation, i.e., a SNP that creates a premature stop codon, a SNP that generates a read-through mutation by abolishing a stop codon, or due to any SNP disclosed by the present invention that otherwise alters the structure, function/activity, or expression of a protein, such as a SNP in a regulatory region (e.g. a promoter or enhancer) or a SNP that leads to alternative or defective splicing, such as a SNP in an intron or a SNP at an exon/intron boundary. As used herein, the terms “polypeptide”, “peptide”, and “protein” are used interchangeably.

### Isolated Nucleic Acid Molecules and SNP Detection Reagents & Kits

[0089] Tables 1 and 2 provide a variety of information about each SNP of the present invention that is associated with liver fibrosis, including the transcript sequences (SEQ ID NOS:1-15), genomic sequences (SEQ ID NOS:46-56), and protein sequences (SEQ ID NOS:16-30) of the encoded gene products (with the SNPs indicated by IUB codes in the nucleic acid sequences). In addition, Tables 1 and 2 include SNP context sequences, which generally include 100 nucleotide upstream (5′) plus 100 nucleotides downstream (3′) of each SNP position (SEQ ID NOS:31-45 correspond to transcript-based SNP context sequences disclosed in Table 1, and SEQ ID NOS:57-72 correspond to genomic-based context sequences disclosed in Table 2), the alternative nucleotides (alleles) at each SNP position, and additional information about the variant where relevant, such as SNP type (coding, missense, splice site, UTR, etc.), human populations in which the SNP was observed, observed allele frequencies, information about the encoded protein, etc.

[0090] Isolated Nucleic Acid Molecules

[0091] The present invention provides isolated nucleic acid molecules that contain one or more SNPs disclosed Table 1 and/or Table 2. Preferred isolated nucleic acid molecules contain one or more SNPs identified in Table 3 and/or Table 4. Isolated nucleic acid molecules containing one or more SNPs disclosed in at least one of Tables 1-4 may be interchangeably referred to throughout the present text as “SNP-containing nucleic acid molecules”. Isolated nucleic acid molecules may optionally encode a full-length variant protein or fragment thereof. The isolated nucleic acid molecules of the present invention also include probes and primers (which are described in greater detail below in the section entitled “SNP Detection Reagents”), which may be used for assaying the disclosed SNPs, and isolated full-length genes, transcripts, cDNA molecules, and fragments thereof, which may be used for such purposes as expressing an encoded protein.

[0092] As used herein, an “isolated nucleic acid molecule” generally is one that contains a SNP of the present invention or one that hybridizes to such molecule such as a nucleic acid with a complementary sequence, and is separated from most other nucleic acids present in the natural source of the nucleic acid molecule. Moreover, an “isolated” nucleic acid molecule, such as a cDNA molecule containing a SNP of the present invention, can be substantially free of other cellular material, or culture medium when produced by recombinant techniques, or chemical precursors or other chemicals when chemically synthesized. A nucleic acid molecule can be fused to other coding or regulatory sequences and still be considered “isolated”. Nucleic acid molecules present in non-human transgenic animals, which do not naturally occur in the animal, are also considered “isolated”. For example, recombinant DNA molecules contained in a vector are considered “isolated”. Further examples of “isolated” DNA molecules include recombinant DNA molecules maintained in heterologous host cells, and purified (partially or substantially) DNA molecules in solution. Isolated RNA molecules include in vivo or in vitro RNA transcripts of the isolated SNP-containing DNA molecules of the present invention. Isolated nucleic acid molecules according to the present invention further include such molecules produced synthetically.

[0093] Generally, an isolated SNP-containing nucleic acid molecule comprises one or more SNP positions disclosed by the present invention with flanking nucleotide sequences on either side of the SNP positions. A flanking sequence can include nucleotide residues that are naturally associated with the SNP site and/or heterologous nucleotide sequences. Preferably the flanking sequence is up to about 500, 300, 100, 60, 50, 30, 25, 20, 15, 10, 8, or 4 nucleotides (or any other length in-between) on either side of a SNP position, or as long as the full-length gene or entire protein-coding sequence (or any portion thereof such as an exon), especially if the SNP-containing nucleic acid molecule is to be used to produce a protein or protein fragment.

[0094] For full-length genes and entire protein-coding sequences, a SNP flanking sequence can be, for example, up to about 5 KB, 4 KB, 3 KB, 2 KB, 1 KB on either side of the SNP. Furthermore, in such instances, the isolated nucleic acid molecule comprises exonic sequences (including protein-coding and/or non-coding exonic sequences), but may also include intronic sequences. Thus, any protein coding sequence may be either contiguous or separated by introns. The important point is that the nucleic acid is isolated from remote and unimportant flanking sequences and is of appropriate length such that it can be subjected to the specific manipulations or uses described herein such as recombinant protein expression, preparation of probes and primers for assaying the SNP position, and other uses specific to the SNP-containing nucleic acid sequences.

[0095] An isolated SNP-containing nucleic acid molecule can comprise, for example, a full-length gene or transcript, such as a gene isolated from genomic DNA (e.g., by cloning or PCR amplification), a cDNA molecule, or an mRNA transcript molecule. Polymorphic transcript sequences are provided in Table 1 and in the Sequence Listing (SEQ ID NOS: 1-15), and polymorphic genomic sequences are provided in Table 2 and in the Sequence Listing (SEQ ID NOS:46-56). Furthermore, fragments of such full-length genes and transcripts that contain one or more SNPs disclosed herein are also encompassed by the present invention, and such fragments may be used, for example, to express any part of a protein, such as a particular functional domain or an antigenic epitope.

[0096] Thus, the present invention also encompasses fragments of the nucleic acid sequences provided in Tables 1-2 (transcript sequences are provided in Table 1 as SEQ ID NOS:1-15, genomic sequences are provided in Table 2 as SEQ ID NOS:46-56, transcript-based SNP context sequences are provided in Table 1 as SEQ ID NO:31-45, and genomic-based SNP context sequences are provided in Table 2 as SEQ ID NO:57-72) and their complements. A fragment typically comprises a contiguous nucleotide sequence at least about 8 or more nucleotides, more preferably at least about 12 or more nucleotides, and even more preferably at least about 16 or more nucleotides. Further, a fragment could comprise at least about 18, 20, 22, 25, 30, 40, 50, 60, 80, 100, 150, 200, 250 or 500 (or any other number in-between) nucleotides in length. The length of the fragment will be based on its intended use. For example, the fragment can encode epitope-bearing regions of a variant peptide or regions of a variant peptide that differ from the normal/wild-type protein, or can be useful as a polynucleotide probe or primer. Such fragments can be isolated using the nucleotide sequences provided in Table 1 and/or Table 2 for the synthesis of a polynucleotide probe. A labeled probe can then be used, for example, to screen a cDNA library, genomic DNA library, or mRNA to isolate nucleic acid corresponding to the coding region. Further, primers can be used in amplification reactions, such as for purposes of assaying one or more SNPs sites or for cloning specific regions of a gene.

[0097] An isolated nucleic acid molecule of the present invention further encompasses a SNP-containing polynucleotide that is the product of any one of a variety of nucleic acid amplification methods, which are used to increase the copy numbers of a polynucleotide of interest in a nucleic acid sample. Such amplification methods are well known in the art, and they include but are not limited to, polymerase chain reaction (PCR) (U.S. Pat. Nos. 4,683,195; and 4,683,202; PCR Technology: Principles and Applications for DNA Amplification, ed. H. A. Erlich, Freeman Press, NY, N.Y., 1992), ligase chain reaction (LCR) (Wu and Wallace, Genomics 4:560, 1989; Landegren et al., Science 241:1077, 1988), strand displacement amplification (SDA) (U.S. Pat. Nos. 5,270,184; and 5,422,252), transcription-mediated amplification (TMA) (U.S. Pat. No. 5,399,491), linked linear amplification (LLA) (U.S. Pat. No. 6,027,923), and the like, and isothermal amplification methods such as nucleic acid sequence based amplification (NASBA), and self-sustained sequence replication (Guatelli et al., Proc. Natl. Acad. Sci. USA 87: 1874, 1990). Based on such methodologies, a person skilled in the art can readily design primers in any suitable regions 5′ and 3′ to a SNP disclosed herein. Such primers may be used to amplify DNA of any length so long that it contains the SNP of interest in its sequence.

[0098] As used herein, an “amplified polynucleotide” of the invention is a SNP-containing nucleic acid molecule whose amount has been increased at least two fold by any nucleic acid amplification method performed in vitro as compared to its starting amount in a test sample. In other preferred embodiments, an amplified polynucleotide is the result of at least ten fold, fifty fold, one hundred fold, one thousand fold, or even ten thousand fold increase as compared to its starting amount in a test sample. In a typical PCR amplification, a polynucleotide of interest is often amplified at least fifty thousand fold in amount over the unamplified genomic DNA, but the precise amount of amplification needed for an assay depends on the sensitivity of the subsequent detection method used.

[0099] Generally, an amplified polynucleotide is at least about 16 nucleotides in length. More typically, an amplified polynucleotide is at least about 20 nucleotides in length. In a preferred embodiment of the invention, an amplified polynucleotide is at least about 30 nucleotides in length. In a more preferred embodiment of the invention, an amplified polynucleotide is at least about 32, 40, 45, 50, or 60 nucleotides in length. In yet another preferred embodiment of the invention, an amplified polynucleotide is at least about 100, 200, 300, 400, or 500 nucleotides in length. While the total length of an amplified polynucleotide of the invention can be as long as an exon, an intron or the entire gene where the SNP of interest resides, an amplified product is typically up to about 1,000 nucleotides in length (although certain amplification methods may generate amplified products greater than 1000 nucleotides in length). More preferably, an amplified polynucleotide is not greater than about 600-700 nucleotides in length. It is understood that irrespective of the length of an amplified polynucleotide, a SNP of interest may be located anywhere along its sequence.

[0100] In a specific embodiment of the invention, the amplified product is at least about 201 nucleotides in length, comprises one of the transcript-based context sequences or the genomic-based context sequences shown in Tables 1-2. Such a product may have additional sequences on its 5′ end or 3′ end or both. In another embodiment, the amplified product is about 101 nucleotides in length, and it contains a SNP disclosed herein. Preferably, the SNP is located at the middle of the amplified product (e.g., at position 101 in an amplified product that is 201 nucleotides in length, or at position 51 in an amplified product that is 101 nucleotides in length), or within 1, 2, 3, 4, 5, 6, 7, 8, 9, 10, 12, 15, or 20 nucleotides from the middle of the amplified product (however, as indicated above, the SNP of interest may be located anywhere along the length of the amplified product).

[0101] The present invention provides isolated nucleic acid molecules that comprise, consist of, or consist essentially of one or more polynucleotide sequences that contain one or more SNPs disclosed herein, complements thereof, and SNP-containing fragments thereof.

[0102] Accordingly, the present invention provides nucleic acid molecules that consist of any of the nucleotide sequences shown in Table 1 and/or Table 2 (transcript sequences are provided in Table 1 as SEQ ID NOS:1-15, genomic sequences are provided in Table 2 as SEQ ID NOS:46-56, transcript-based SNP context sequences are provided in Table 1 as SEQ ID NO:31-45, and genomic-based SNP context sequences are provided in Table 2 as SEQ ID NO:57-72), or any nucleic acid molecule that encodes any of the variant proteins provided in Table 1 (SEQ ID NOS:16-30). A nucleic acid molecule consists of a nucleotide sequence when the nucleotide sequence is the complete nucleotide sequence of the nucleic acid molecule.

[0103] The present invention further provides nucleic acid molecules that consist essentially of any of the nucleotide sequences shown in Table 1 and/or Table 2 (transcript sequences are provided in Table 1 as SEQ ID NOS:1-15, genomic sequences are provided in Table 2 as SEQ ID NOS:46-56, transcript-based SNP context sequences are provided in Table 1 as SEQ ID NO:31-45, and genomic-based SNP context sequences are provided in Table 2 as SEQ ID NO:57-72), or any nucleic acid molecule that encodes any of the variant proteins provided in Table 1 (SEQ ID NOS:16-30). A nucleic acid molecule consists essentially of a nucleotide sequence when such a nucleotide sequence is present with only a few additional nucleotide residues in the final nucleic acid molecule.

[0104] The present invention further provides nucleic acid molecules that comprise any of the nucleotide sequences shown in Table 1 and/or Table 2 or a SNP-containing fragment thereof (transcript sequences are provided in Table 1 as SEQ ID NOS:1-15, genomic sequences are provided in Table 2 as SEQ ID NOS:46-56, transcript-based SNP context sequences are provided in Table 1 as SEQ ID NO:31-45, and genomic-based SNP context sequences are provided in Table 2 as SEQ ID NO:57-72), or any nucleic acid molecule that encodes any of the variant proteins provided in Table 1 (SEQ ID NOS:16-30). A nucleic acid molecule comprises a nucleotide sequence when the nucleotide sequence is at least part of the final nucleotide sequence of the nucleic acid molecule. In such a fashion, the nucleic acid molecule can be only the nucleotide sequence or have additional nucleotide residues, such as residues that are naturally associated with it or heterologous nucleotide sequences. Such a nucleic acid molecule can have one to a few additional nucleotides or can comprise many more additional nucleotides. A brief description of how various types of these nucleic acid molecules can be readily made and isolated is provided below, and such techniques are well known to those of ordinary skill in the art (Sambrook and Russell, 2000, Molecular Cloning: A Laboratory Manual, Cold Spring Harbor Press, NY).

[0105] The isolated nucleic acid molecules can encode mature proteins plus additional amino or carboxyl-terminal amino acids or both, or amino acids interior to the mature peptide (when the mature form has more than one peptide chain, for instance). Such sequences may play a role in processing of a protein from precursor to a mature form, facilitate protein trafficking, prolong or shorten protein half-life, or facilitate manipulation of a protein for assay or production. As generally is the case in situ, the additional amino acids may be processed away from the mature protein by cellular enzymes.

[0106] Thus, the isolated nucleic acid molecules include, but are not limited to, nucleic acid molecules having a sequence encoding a peptide alone, a sequence encoding a mature peptide and additional coding sequences such as a leader or secretory sequence (e.g., a pre-pro or pro-protein sequence), a sequence encoding a mature peptide with or without additional coding sequences, plus additional non-coding sequences, for example introns and non-coding 5′ and 3′ sequences such as transcribed but untranslated sequences that play a role in, for example, transcription, mRNA processing (including splicing and polyadenylation signals), ribosome binding, and/or stability of mRNA. In addition, the nucleic acid molecules may be fused to heterologous marker sequences encoding, for example, a peptide that facilitates purification.

[0107] Isolated nucleic acid molecules can be in the form of RNA, such as mRNA, or in the form DNA, including cDNA and genomic DNA, which may be obtained, for example, by molecular cloning or produced by chemical synthetic techniques or by a combination thereof (Sambrook and Russell, 2000, Molecular Cloning: A Laboratory Manual, Cold Spring Harbor Press, NY). Furthermore, isolated nucleic acid molecules, particularly SNP detection reagents such as probes and primers, can also be partially or completely in the form of one or more types of nucleic acid analogs, such as peptide nucleic acid (PNA) (U.S. Pat. Nos. 5,539,082; 5,527,675; 5,623,049; 5,714,331). The nucleic acid, especially DNA, can be double-stranded or single-stranded. Single-stranded nucleic acid can be the coding strand (sense strand) or the complementary non-coding strand (antisense strand). DNA, RNA, or PNA segments can be assembled, for example, from fragments of the human genome (in the case of DNA or RNA) or single nucleotides, short oligonucleotide linkers, or from a series of oligonucleotides, to provide a synthetic nucleic acid molecule. Nucleic acid molecules can be readily synthesized using the sequences provided herein as a reference; oligonucleotide and PNA oligomer synthesis techniques are well known in the art (see, e.g., Corey, “Peptide nucleic acids: expanding the scope of nucleic acid recognition”, Trends Biotechnol. 1997 June; 15(6):224-9, and Hyrup et al., “Peptide nucleic acids (PNA): synthesis, properties and potential applications”, Bioorg Med Chem. 1996 January; 4(1):5-23). Furthermore, large-scale automated oligonucleotide/PNA synthesis (including synthesis on an array or bead surface or other solid support) can readily be accomplished using commercially available nucleic acid synthesizers, such as the Applied Biosystems (Foster City, Calif.) 3900 High-Throughput DNA Synthesizer or Expedite 8909 Nucleic Acid Synthesis System, and the sequence information provided herein.

[0108] The present invention encompasses nucleic acid analogs that contain modified, synthetic, or non-naturally occurring nucleotides or structural elements or other alternative/modified nucleic acid chemistries known in the art. Such nucleic acid analogs are useful, for example, as detection reagents (e.g., primers/probes) for detecting one or more SNPs identified in Table 1 and/or Table 2. Furthermore, kits/systems (such as beads, arrays, etc.) that include these analogs are also encompassed by the present invention. For example, PNA oligomers that are based on the polymorphic sequences of the present invention are specifically contemplated. PNA oligomers are analogs of DNA in which the phosphate backbone is replaced with a peptide-like backbone (Lagriffoul et al., Bioorganic & Medicinal Chemistry Letters, 4: 1081-1082 (1994), Petersen et al., Bioorganic & Medicinal Chemistry Letters, 6: 793-796 (1996), Kumar et al., Organic Letters 3(9): 1269-1272 (2001), WO96/04000). PNA hybridizes to complementary RNA or DNA with higher affinity and specificity than conventional oligonucleotides and oligonucleotide analogs. The properties of PNA enable novel molecular biology and biochemistry applications unachievable with traditional oligonucleotides and peptides.

[0109] Additional examples of nucleic acid modifications that improve the binding properties and/or stability of a nucleic acid include the use of base analogs such as inosine, intercalators (U.S. Pat. No. 4,835,263) and the minor groove binders (U.S. Pat. No. 5,801,115). Thus, references herein to nucleic acid molecules, SNP-containing nucleic acid molecules, SNP detection reagents (e.g., probes and primers), oligonucleotides/polynucleotides include PNA oligomers and other nucleic acid analogs. Other examples of nucleic acid analogs and alternative/modified nucleic acid chemistries known in the art are described in Current Protocols in Nucleic Acid Chemistry, John Wiley & Sons, N.Y. (2002).

[0110] The present invention further provides nucleic acid molecules that encode fragments of the variant polypeptides disclosed herein as well as nucleic acid molecules that encode obvious variants of such variant polypeptides. Such nucleic acid molecules may be naturally occurring, such as paralogs (different locus) and orthologs (different organism), or may be constructed by recombinant DNA methods or by chemical synthesis. Non-naturally occurring variants may be made by mutagenesis techniques, including those applied to nucleic acid molecules, cells, or organisms. Accordingly, the variants can contain nucleotide substitutions, deletions, inversions and insertions (in addition to the SNPs disclosed in Tables 1-2). Variation can occur in either or both the coding and non-coding regions. The variations can produce conservative and/or non-conservative amino acid substitutions.

[0111] Further variants of the nucleic acid molecules disclosed in Tables 1-2, such as naturally occurring allelic variants (as well as orthologs and paralogs) and synthetic variants produced by mutagenesis techniques, can be identified and/or produced using methods well known in the art. Such further variants can comprise a nucleotide sequence that shares at least 70-80%, 80-85%, 85-90%, 91%, 92%, 93%, 94%, 95%, 96%, 97%, 98%, or 99% sequence identity with a nucleic acid sequence disclosed in Table 1 and/or Table 2 (or a fragment thereof) and that includes a novel SNP allele disclosed in Table 1 and/or Table 2. Further, variants can comprise a nucleotide sequence that encodes a polypeptide that shares at least 70-80%, 80-85%, 85-90%, 91%, 92%, 93%, 94%, 95%, 96%, 97%, 98%, or 99% sequence identity with a polypeptide sequence disclosed in Table 1 (or a fragment thereof) and that includes a novel SNP allele disclosed in Table 1 and/or Table 2. Thus, an aspect of the present invention that is specifically contemplated are isolated nucleic acid molecules that have a certain degree of sequence variation compared with the sequences shown in Tables 1-2, but that contain a novel SNP allele disclosed herein. In other words, as long as an isolated nucleic acid molecule contains a novel SNP allele disclosed herein, other portions of the nucleic acid molecule that flank the novel SNP allele can vary to some degree from the specific transcript, genomic, and context sequences shown in Tables 1-2, and can encode a polypeptide that varies to some degree from the specific polypeptide sequences shown in Table 1.

[0112] To determine the percent identity of two amino acid sequences or two nucleotide sequences of two molecules that share sequence homology, the sequences are aligned for optimal comparison purposes (e.g., gaps can be introduced in one or both of a first and a second amino acid or nucleic acid sequence for optimal alignment and non-homologous sequences can be disregarded for comparison purposes). In a preferred embodiment, at least 30%, 40%, 50%, 60%, 70%, 80%, or 90% or more of the length of a reference sequence is aligned for comparison purposes. The amino acid residues or nucleotides at corresponding amino acid positions or nucleotide positions are then compared. When a position in the first sequence is occupied by the same amino acid residue or nucleotide as the corresponding position in the second sequence, then the molecules are identical at that position (as used herein, amino acid or nucleic acid “identity” is equivalent to amino acid or nucleic acid “homology”). The percent identity between the two sequences is a function of the number of identical positions shared by the sequences, taking into account the number of gaps, and the length of each gap, which need to be introduced for optimal alignment of the two sequences.

[0113] The comparison of sequences and determination of percent identity between two sequences can be accomplished using a mathematical algorithm. (Computational Molecular Biology, Lesk, A. M., ed., Oxford University Press, New York, 1988; Biocomputing: Informatics and Genome Projects, Smith, D. W., ed., Academic Press, New York, 1993; Computer Analysis of Sequence Data, Part 1, Griffin, A. M., and Griffin, H. G., eds., Humana Press, New Jersey, 1994; Sequence Analysis in Molecular Biology, von Heinje, G., Academic Press, 1987; and Sequence Analysis Primer, Gribskov, M. and Devereux, J., eds., M Stockton Press, New York, 1991). In a preferred embodiment, the percent identity between two amino acid sequences is determined using the Needleman and Wunsch algorithm (J. Mol. Biol. (48):444-453 (1970)) which has been incorporated into the GAP program in the GCG software package, using either a Blossom 62 matrix or a PAM250 matrix, and a gap weight of 16, 14, 12, 10, 8, 6, or 4 and a length weight of 1, 2, 3, 4, 5, or 6.

[0114] In yet another preferred embodiment, the percent identity between two nucleotide sequences is determined using the GAP program in the GCG software package (Devereux, J., et al., Nucleic Acids Res. 12(1):387 (1984)), using a NWSgapdna.CMP matrix and a gap weight of 40, 50, 60, 70, or 80 and a length weight of 1, 2, 3, 4, 5, or 6. In another embodiment, the percent identity between two amino acid or nucleotide sequences is determined using the algorithm of E. Myers and W. Miller (CABIOS, 4:11-17 (1989)) which has been incorporated into the ALIGN program (version 2.0), using a PAM120 weight residue table, a gap length penalty of 12, and a gap penalty of 4.

[0115] The nucleotide and amino acid sequences of the present invention can further be used as a “query sequence” to perform a search against sequence databases to, for example, identify other family members or related sequences. Such searches can be performed using the NBLAST and XBLAST programs (version 2.0) of Altschul, et al. (J. Mol. Biol. 215:403-10 (1990)). BLAST nucleotide searches can be performed with the NBLAST program, score=100, wordlength=12 to obtain nucleotide sequences homologous to the nucleic acid molecules of the invention. BLAST protein searches can be performed with the XBLAST program, score=50, wordlength=3 to obtain amino acid sequences homologous to the proteins of the invention. To obtain gapped alignments for comparison purposes, Gapped BLAST can be utilized as described in Altschul et al. (Nucleic Acids Res. 25(17):3389-3402 (1997)). When utilizing BLAST and gapped BLAST programs, the default parameters of the respective programs (e.g., XBLAST and NBLAST) can be used. In addition to BLAST, examples of other search and sequence comparison programs used in the art include, but are not limited to, FASTA (Pearson, Methods Mol. Biol. 25, 365-389 (1994)) and KERR (Dufresne et al., Nat Biotechnol 2002 December; 20(12):1269-71). For further information regarding bioinformatics techniques, see Current Protocols in Bioinformatics, John Wiley & Sons, Inc., N.Y.

[0116] The present invention further provides non-coding fragments of the nucleic acid molecules disclosed in Table 1 and/or Table 2. Preferred non-coding fragments include, but are not limited to, promoter sequences, enhancer sequences, intronic sequences, 5′ untranslated regions (UTRs), 3′ untranslated regions, gene modulating sequences and gene termination sequences. Such fragments are useful, for example, in controlling heterologous gene expression and in developing screens to identify gene-modulating agents.

[0117] SNP Detection Reagents

[0118] In a specific aspect of the present invention, the SNPs disclosed in Table 1 and/or Table 2, and their associated transcript sequences (provided in Table 1 as SEQ ID NOS:1-15), genomic sequences (provided in Table 2 as SEQ ID NOS:46-56), and context sequences (transcript-based context sequences are provided in Table 1 as SEQ ID NOS:31-45; genomic-based context sequences are provided in Table 2 as SEQ ID NOS:57-72), can be used for the design of SNP detection reagents. As used herein, a “SNP detection reagent” is a reagent that specifically detects a specific target SNP position disclosed herein, and that is preferably specific for a particular nucleotide (allele) of the target SNP position (i.e., the detection reagent preferably can differentiate between different alternative nucleotides at a target SNP position, thereby allowing the identity of the nucleotide present at the target SNP position to be determined). Typically, such detection reagent hybridizes to a target SNP-containing nucleic acid molecule by complementary base-pairing in a sequence specific manner, and discriminates the target variant sequence from other nucleic acid sequences such as an art-known form in a test sample. An example of a detection reagent is a probe that hybridizes to a target nucleic acid containing one or more of the SNPs provided in Table 1 and/or Table 2. In a preferred embodiment, such a probe can differentiate between nucleic acids having a particular nucleotide (allele) at a target SNP position from other nucleic acids that have a different nucleotide at the same target SNP position. In addition, a detection reagent may hybridize to a specific region 5′ and/or 3′ to a SNP position, particularly a region corresponding to the context sequences provided in Table 1 and/or Table 2 (transcript-based context sequences are provided in Table 1 as SEQ ID NOS:31-45; genomic-based context sequences are provided in Table 2 as SEQ ID NOS:57-72). Another example of a detection reagent is a primer which acts as an initiation point of nucleotide extension along a complementary strand of a target polynucleotide. The SNP sequence information provided herein is also useful for designing primers, e.g. allele-specific primers, to amplify (e.g., using PCR) any SNP of the present invention.

[0119] In one preferred embodiment of the invention, a SNP detection reagent is an isolated or synthetic DNA or RNA polynucleotide probe or primer or PNA oligomer, or a combination of DNA, RNA and/or PNA, that hybridizes to a segment of a target nucleic acid molecule containing a SNP identified in Table 1 and/or Table 2. A detection reagent in the form of a polynucleotide may optionally contain modified base analogs, intercalators or minor groove binders. Multiple detection reagents such as probes may be, for example, affixed to a solid support (e.g., arrays or beads) or supplied in solution (e.g., probe/primer sets for enzymatic reactions such as PCR, RT-PCR, TaqMan assays, or primer-extension reactions) to form a SNP detection kit.

[0120] A probe or primer typically is a substantially purified oligonucleotide or PNA oligomer. Such oligonucleotide typically comprises a region of complementary nucleotide sequence that hybridizes under stringent conditions to at least about 8, 10, 12, 16, 18, 20, 22, 25, 30, 40, 50, 55, 60, 65, 70, 80, 90, 100, 120 (or any other number in-between) or more consecutive nucleotides in a target nucleic acid molecule. Depending on the particular assay, the consecutive nucleotides can either include the target SNP position, or be a specific region in close enough proximity 5′ and/or 3′ to the SNP position to carry out the desired assay.

[0121] Other preferred primer and probe sequences can readily be determined using the transcript sequences (SEQ ID NOS:1-15), genomic sequences (SEQ ID NOS:46-56), and SNP context sequences (transcript-based context sequences are provided in Table 1 as SEQ ID NOS:31-45; genomic-based context sequences are provided in Table 2 as SEQ ID NOS:57-72) disclosed in the Sequence Listing and in Tables 1-2. It will be apparent to one of skill in the art that such primers and probes are directly useful as reagents for genotyping the SNPs of the present invention, and can be incorporated into any kit/system format.

[0122] In order to produce a probe or primer specific for a target SNP-containing sequence, the gene/transcript and/or context sequence surrounding the SNP of interest is typically examined using a computer algorithm which starts at the 5′ or at the 3′ end of the nucleotide sequence. Typical algorithms will then identify oligomers of defined length that are unique to the gene/SNP context sequence, have a GC content within a range suitable for hybridization, lack predicted secondary structure that may interfere with hybridization, and/or possess other desired characteristics or that lack other undesired characteristics.

[0123] A primer or probe of the present invention is typically at least about 8 nucleotides in length. In one embodiment of the invention, a primer or a probe is at least about 10 nucleotides in length. In a preferred embodiment, a primer or a probe is at least about 12 nucleotides in length. In a more preferred embodiment, a primer or probe is at least about 16, 17, 18, 19, 20, 21, 22, 23, 24 or 25 nucleotides in length. While the maximal length of a probe can be as long as the target sequence to be detected, depending on the type of assay in which it is employed, it is typically less than about 50, 60, 65, or 70 nucleotides in length. In the case of a primer, it is typically less than about 30 nucleotides in length. In a specific preferred embodiment of the invention, a primer or a probe is within the length of about 18 and about 28 nucleotides. However, in other embodiments, such as nucleic acid arrays and other embodiments in which probes are affixed to a substrate, the probes can be longer, such as on the order of 30-70, 75, 80, 90, 100, or more nucleotides in length (see the section below entitled “SNP Detection Kits and Systems”).

[0124] For analyzing SNPs, it may be appropriate to use oligonucleotides specific for alternative SNP alleles. Such oligonucleotides which detect single nucleotide variations in target sequences may be referred to by such terms as “allele-specific oligonucleotides”, “allele-specific probes”, or “allele-specific primers”. The design and use of allele-specific probes for analyzing polymorphisms is described in, e.g., Mutation Detection A Practical Approach, ed. Cotton et al. Oxford University Press, 1998; Saiki et al., Nature 324, 163-166 (1986); Dattagupta, EP235,726; and Saiki, WO 89/11548.

[0125] While the design of each allele-specific primer or probe depends on variables such as the precise composition of the nucleotide sequences flanking a SNP position in a target nucleic acid molecule, and the length of the primer or probe, another factor in the use of primers and probes is the stringency of the condition under which the hybridization between the probe or primer and the target sequence is performed. Higher stringency conditions utilize buffers with lower ionic strength and/or a higher reaction temperature, and tend to require a more perfect match between probe/primer and a target sequence in order to form a stable duplex. If the stringency is too high, however, hybridization may not occur at all. In contrast, lower stringency conditions utilize buffers with higher ionic strength and/or a lower reaction temperature, and permit the formation of stable duplexes with more mismatched bases between a probe/primer and a target sequence. By way of example and not limitation, exemplary conditions for high stringency hybridization conditions using an allele-specific probe are as follows: Prehybridization with a solution containing 5× standard saline phosphate EDTA (SSPE), 0.5% NaDodSO₄ (SDS) at 55° C., and incubating probe with target nucleic acid molecules in the same solution at the same temperature, followed by washing with a solution containing 2×SSPE, and 0.1% SDS at 55° C. or room temperature.

[0126] Moderate stringency hybridization conditions may be used for allele-specific primer extension reactions with a solution containing, e.g., about 50 mM KCl at about 46° C. Alternatively, the reaction may be carried out at an elevated temperature such as 60° C. In another embodiment, a moderately stringent hybridization condition suitable for oligonucleotide ligation assay (OLA) reactions wherein two probes are ligated if they are completely complementary to the target sequence may utilize a solution of about 100 mM KCl at a temperature of 46° C.

[0127] In a hybridization-based assay, allele-specific probes can be designed that hybridize to a segment of target DNA from one individual but do not hybridize to the corresponding segment from another individual due to the presence of different polymorphic forms (e.g., alternative SNP alleles/nucleotides) in the respective DNA segments from the two individuals. Hybridization conditions should be sufficiently stringent that there is a significant detectable difference in hybridization intensity between alleles, and preferably an essentially binary response, whereby a probe hybridizes to only one of the alleles or significantly more strongly to one allele. While a probe may be designed to hybridize to a target sequence that contains a SNP site such that the SNP site aligns anywhere along the sequence of the probe, the probe is preferably designed to hybridize to a segment of the target sequence such that the SNP site aligns with a central position of the probe (e.g., a position within the probe that is at least three nucleotides from either end of the probe). This design of probe generally achieves good discrimination in hybridization between different allelic forms.

[0128] In another embodiment, a probe or primer may be designed to hybridize to a segment of target DNA such that the SNP aligns with either the 5′ most end or the 3′ most end of the probe or primer. In a specific preferred embodiment which is particularly suitable for use in a oligonucleotide ligation assay (U.S. Pat. No. 4,988,617), the 3′ most nucleotide of the probe aligns with the SNP position in the target sequence.

[0129] Oligonucleotide probes and primers may be prepared by methods well known in the art. Chemical synthetic methods include, but are limited to, the phosphotriester method described by Narang et al., 1979, Methods in Enzymology 68:90; the phosphodiester method described by Brown et al., 1979, Methods in Enzymology 68:109, the diethylphosphoamidate method described by Beaucage et al., 1981, Tetrahedron Letters 22:1859; and the solid support method described in U.S. Pat. No. 4,458,066.

[0130] Allele-specific probes are often used in pairs (or, less commonly, in sets of 3 or 4, such as if a SNP position is known to have 3 or 4 alleles, respectively, or to assay both strands of a nucleic acid molecule for a target SNP allele), and such pairs may be identical except for a one nucleotide mismatch that represents the allelic variants at the SNP position. Commonly, one member of a pair perfectly matches a reference form of a target sequence that has a more common SNP allele (i.e., the allele that is more frequent in the target population) and the other member of the pair perfectly matches a form of the target sequence that has a less common SNP allele (i.e., the allele that is rarer in the target population). In the case of an array, multiple pairs of probes can be immobilized on the same support for simultaneous analysis of multiple different polymorphisms.

[0131] In one type of PCR-based assay, an allele-specific primer hybridizes to a region on a target nucleic acid molecule that overlaps a SNP position and only primes amplification of an allelic form to which the primer exhibits perfect complementarity (Gibbs, 1989, Nucleic Acid Res. 17 2427-2448). Typically, the primer's 3′-most nucleotide is aligned with and complementary to the SNP position of the target nucleic acid molecule. This primer is used in conjunction with a second primer that hybridizes at a distal site. Amplification proceeds from the two primers, producing a detectable product that indicates which allelic form is present in the test sample. A control is usually performed with a second pair of primers, one of which shows a single base mismatch at the polymorphic site and the other of which exhibits perfect complementarity to a distal site. The single-base mismatch prevents amplification or substantially reduces amplification efficiency, so that either no detectable product is formed or it is formed in lower amounts or at a slower pace. The method generally works most effectively when the mismatch is at the 3′-most position of the oligonucleotide (i.e., the 3′-most position of the oligonucleotide aligns with the target SNP position) because this position is most destabilizing to elongation from the primer (see, e.g., WO 93/22456). This PCR-based assay can be utilized as part of the TaqMan assay, described below.

[0132] In a specific embodiment of the invention, a primer of the invention contains a sequence substantially complementary to a segment of a target SNP-containing nucleic acid molecule except that the primer has a mismatched nucleotide in one of the three nucleotide positions at the 3′-most end of the primer, such that the mismatched nucleotide does not base pair with a particular allele at the SNP site. In a preferred embodiment, the mismatched nucleotide in the primer is the second from the last nucleotide at the 3′-most position of the primer. In a more preferred embodiment, the mismatched nucleotide in the primer is the last nucleotide at the 3′-most position of the primer.

[0133] In another embodiment of the invention, a SNP detection reagent of the invention is labeled with a fluorogenic reporter dye that emits a detectable signal. While the preferred reporter dye is a fluorescent dye, any reporter dye that can be attached to a detection reagent such as an oligonucleotide probe or primer is suitable for use in the invention. Such dyes include, but are not limited to, Acridine, AMCA, BODIPY, Cascade Blue, Cy2, Cy3, Cy5, Cy7, Dabcyl, Edans, Eosin, Erythrosin, Fluorescein, 6-Fam, Tet, Joe, Hex, Oregon Green, Rhodamine, Rhodol Green, Tamra, Rox, and Texas Red.

[0134] In yet another embodiment of the invention, the detection reagent may be further labeled with a quencher dye such as Tamra, especially when the reagent is used as a self-quenching probe such as a TaqMan (U.S. Pat. Nos. 5,210,015 and 5,538,848) or Molecular Beacon probe (U.S. Pat. Nos. 5,118,801 and 5,312,728), or other stemless or linear beacon probe (Livak et al., 1995, PCR Method Appl. 4:357-362; Tyagi et al., 1996, Nature Biotechnology 14: 303-308; Nazarenko et al., 1997, Nucl. Acids Res. 25:2516-2521; U.S. Pat. Nos. 5,866,336 and 6,117,635).

[0135] The detection reagents of the invention may also contain other labels, including but not limited to, biotin for streptavidin binding, hapten for antibody binding, and oligonucleotide for binding to another complementary oligonucleotide such as pairs of zipcodes.

[0136] The present invention also contemplates reagents that do not contain (or that are complementary to) a SNP nucleotide identified herein but that are used to assay one or more SNPs disclosed herein. For example, primers that flank, but do not hybridize directly to a target SNP position provided herein are useful in primer extension reactions in which the primers hybridize to a region adjacent to the target SNP position (i.e., within one or more nucleotides from the target SNP site). During the primer extension reaction, a primer is typically not able to extend past a target SNP site if a particular nucleotide (allele) is present at that target SNP site, and the primer extension product can be detected in order to determine which SNP allele is present at the target SNP site. For example, particular ddNTPs are typically used in the primer extension reaction to terminate primer extension once a ddNTP is incorporated into the extension product (a primer extension product which includes a ddNTP at the 3′-most end of the primer extension product, and in which the ddNTP is a nucleotide of a SNP disclosed herein, is a composition that is specifically contemplated by the present invention). Thus, reagents that bind to a nucleic acid molecule in a region adjacent to a SNP site and that are used for assaying the SNP site, even though the bound sequences do not necessarily include the SNP site itself, are also contemplated by the present invention.

[0137] SNP Detection Kits and Systems

[0138] A person skilled in the art will recognize that, based on the SNP and associated sequence information disclosed herein, detection reagents can be developed and used to assay any SNP of the present invention individually or in combination, and such detection reagents can be readily incorporated into one of the established kit or system formats which are well known in the art. The terms “kits” and “systems”, as used herein in the context of SNP detection reagents, are intended to refer to such things as combinations of multiple SNP detection reagents, or one or more SNP detection reagents in combination with one or more other types of elements or components (e.g., other types of biochemical reagents, containers, packages such as packaging intended for commercial sale, substrates to which SNP detection reagents are attached, electronic hardware components, etc.). Accordingly, the present invention further provides SNP detection kits and systems, including but not limited to, packaged probe and primer sets (e.g., TaqMan probe/primer sets), arrays/microarrays of nucleic acid molecules, and beads that contain one or more probes, primers, or other detection reagents for detecting one or more SNPs of the present invention. The kits/systems can optionally include various electronic hardware components; for example, arrays (“DNA chips”) and microfluidic systems (“lab-on-a-chip” systems) provided by various manufacturers typically comprise hardware components. Other kits/systems (e.g., probe/primer sets) may not include electronic hardware components, but may be comprised of, for example, one or more SNP detection reagents (along with, optionally, other biochemical reagents) packaged in one or more containers.

[0139] In some embodiments, a SNP detection kit typically contains one or more detection reagents and other components (e.g., a buffer, enzymes such as DNA polymerases or ligases, chain extension nucleotides such as deoxynucleotide triphosphates, and in the case of Sanger-type DNA sequencing reactions, chain terminating nucleotides, positive control sequences, negative control sequences, and the like) necessary to carry out an assay or reaction, such as amplification and/or detection of a SNP-containing nucleic acid molecule. A kit may further contain means for determining the amount of a target nucleic acid, and means for comparing the amount with a standard, and can comprise instructions for using the kit to detect the SNP-containing nucleic acid molecule of interest. In one embodiment of the present invention, kits are provided which contain the necessary reagents to carry out one or more assays to detect one or more SNPs disclosed herein. In a preferred embodiment of the present invention, SNP detection kits/systems are in the form of nucleic acid arrays, or compartmentalized kits, including microfluidic/lab-on-a-chip systems.

[0140] SNP detection kits/systems may contain, for example, one or more probes, or pairs of probes, that hybridize to a nucleic acid molecule at or near each target SNP position. Multiple pairs of allele-specific probes may be included in the kit/system to simultaneously assay large numbers of SNPs, at least one of which is a SNP of the present invention. In some kits/systems, the allele-specific probes are immobilized to a substrate such as an array or bead. For example, the same substrate can comprise allele-specific probes for detecting at least 1; 10; 100; 1000; 10,000; 100,000 (or any other number in-between) or substantially all of the SNPs shown in Table 1 and/or Table 2.

[0141] The terms “arrays”, “microarrays”, and “DNA chips” are used herein interchangeably to refer to an array of distinct polynucleotides affixed to a substrate, such as glass, plastic, paper, nylon or other type of membrane, filter, chip, or any other suitable solid support. The polynucleotides can be synthesized directly on the substrate, or synthesized separate from the substrate and then affixed to the substrate. In one embodiment, the microarray is prepared and used according to the methods described in U.S. Pat. No. 5,837,832, Chee et al., PCT application WO95/11995 (Chee et al.), Lockhart, D. J. et al. (1996; Nat. Biotech. 14: 1675-1680) and Schena, M. et al. (1996; Proc. Natl. Acad. Sci. 93: 10614-10619), all of which are incorporated herein in their entirety by reference. In other embodiments, such arrays are produced by the methods described by Brown et al., U.S. Pat. No. 5,807,522.

[0142] Nucleic acid arrays are reviewed in the following references: Zammatteo et al., “New chips for molecular biology and diagnostics”, Biotechnol Annu Rev. 2002; 8:85-101; Sosnowski et al., “Active microelectronic array system for DNA hybridization, genotyping and pharmacogenomic applications”, Psychiatr Genet. 2002 December; 12(4):181-92; Heller, “DNA microarray technology: devices, systems, and applications”, Annu Rev Biomed Eng. 2002; 4:129-53. Epub 2002 Mar. 22; Kolchinsky et al., “Analysis of SNPs and other genomic variations using gel-based chips”, Hum Mutat. 2002 April; 19(4):343-60; and McGall et al., “High-density genechip oligonucleotide probe arrays”, Adv Biochem Eng Biotechnol. 2002; 77:21-42.

[0143] Any number of probes, such as allele-specific probes, may be implemented in an array, and each probe or pair of probes can hybridize to a different SNP position. In the case of polynucleotide probes, they can be synthesized at designated areas (or synthesized separately and then affixed to designated areas) on a substrate using a light-directed chemical process. Each DNA chip can contain, for example, thousands to millions of individual synthetic polynucleotide probes arranged in a grid-like pattern and miniaturized (e.g., to the size of a dime). Preferably, probes are attached to a solid support in an ordered, addressable array.

[0144] A microarray can be composed of a large number of unique, single-stranded polynucleotides, usually either synthetic antisense polynucleotides or fragments of cDNAs, fixed to a solid support. Typical polynucleotides are preferably about 6-60 nucleotides in length, more preferably about 15-30 nucleotides in length, and most preferably about 18-25 nucleotides in length. For certain types of microarrays or other detection kits/systems, it may be preferable to use oligonucleotides that are only about 7-20 nucleotides in length. In other types of arrays, such as arrays used in conjunction with chemiluminescent detection technology, preferred probe lengths can be, for example, about 15-80 nucleotides in length, preferably about 50-70 nucleotides in length, more preferably about 55-65 nucleotides in length, and most preferably about 60 nucleotides in length. The microarray or detection kit can contain polynucleotides that cover the known 5′ or 3′ sequence of a gene/transcript or target SNP site, sequential polynucleotides that cover the full-length sequence of a gene/transcript; or unique polynucleotides selected from particular areas along the length of a target gene/transcript sequence, particularly areas corresponding to one or more SNPs disclosed in Table 1 and/or Table 2. Polynucleotides used in the microarray or detection kit can be specific to a SNP or SNPs of interest (e.g., specific to a particular SNP allele at a target SNP site, or specific to particular SNP alleles at multiple different SNP sites), or specific to a polymorphic gene/transcript or genes/transcripts of interest.

[0145] Hybridization assays based on polynucleotide arrays rely on the differences in hybridization stability of the probes to perfectly matched and mismatched target sequence variants. For SNP genotyping, it is generally preferable that stringency conditions used in hybridization assays are high enough such that nucleic acid molecules that differ from one another at as little as a single SNP position can be differentiated (e.g., typical SNP hybridization assays are designed so that hybridization will occur only if one particular nucleotide is present at a SNP position, but will not occur if an alternative nucleotide is present at that SNP position). Such high stringency conditions may be preferable when using, for example, nucleic acid arrays of allele-specific probes for SNP detection. Such high stringency conditions are described in the preceding section, and are well known to those skilled in the art and can be found in, for example, Current Protocols in Molecular Biology, John Wiley & Sons, N.Y. (1989), 6.3.1-6.3.6.

[0146] In other embodiments, the arrays are used in conjunction with chemiluminescent detection technology. The following patents and patent applications, which are all hereby incorporated by reference, provide additional information pertaining to chemiluminescent detection: U.S. patent application Ser. Nos. 10/620,332 and 10/620,333 describe chemiluminescent approaches for microarray detection; U.S. Pat. Nos. 6,124,478, 6,107,024, 5,994,073, 5,981,768, 5,871,938, 5,843,681, 5,800,999, and 5,773,628 describe methods and compositions of dioxetane for performing chemiluminescent detection; and U.S. published application US2002/0110828 discloses methods and compositions for microarray controls.

[0147] In one embodiment of the invention, a nucleic acid array can comprise an array of probes of about 15-25 nucleotides in length. In further embodiments, a nucleic acid array can comprise any number of probes, in which at least one probe is capable of detecting one or more SNPs disclosed in Table 1 and/or Table 2, and/or at least one probe comprises a fragment of one of the sequences selected from the group consisting of those disclosed in Table 1, Table 2, the Sequence Listing, and sequences complementary thereto, said fragment comprising at least about 8 consecutive nucleotides, preferably 10, 12, 15, 16, 18, 20, more preferably 22, 25, 30, 40, 47, 50, 55, 60, 65, 70, 80, 90, 100, or more consecutive nucleotides (or any other number in-between) and containing (or being complementary to) a novel SNP allele disclosed in Table 1 and/or Table 2. In some embodiments, the nucleotide complementary to the SNP site is within 5, 4, 3, 2, or 1 nucleotide from the center of the probe, more preferably at the center of said probe.

[0148] A polynucleotide probe can be synthesized on the surface of the substrate by using a chemical coupling procedure and an ink jet application apparatus, as described in PCT application WO95/251116 (Baldeschweiler et al.) which is incorporated herein in its entirety by reference. In another aspect, a “gridded” array analogous to a dot (or slot) blot may be used to arrange and link cDNA fragments or oligonucleotides to the surface of a substrate using a vacuum system, thermal, UV, mechanical or chemical bonding procedures. An array, such as those described above, may be produced by hand or by using available devices (slot blot or dot blot apparatus), materials (any suitable solid support), and machines (including robotic instruments), and may contain 8, 24, 96, 384, 1536, 6144 or more polynucleotides, or any other number which lends itself to the efficient use of commercially available instrumentation.

[0149] Using such arrays or other kits/systems, the present invention provides methods of identifying the SNPs disclosed herein in a test sample. Such methods typically involve incubating a test sample of nucleic acids with an array comprising one or more probes corresponding to at least one SNP position of the present invention, and assaying for binding of a nucleic acid from the test sample with one or more of the probes. Conditions for incubating a SNP detection reagent (or a kit/system that employs one or more such SNP detection reagents) with a test sample vary. Incubation conditions depend on such factors as the format employed in the assay, the detection methods employed, and the type and nature of the detection reagents used in the assay. One skilled in the art will recognize that any one of the commonly available hybridization, amplification and array assay formats can readily be adapted to detect the SNPs disclosed herein.

[0150] A SNP detection kit/system of the present invention may include components that are used to prepare nucleic acids from a test sample for the subsequent amplification and/or detection of a SNP-containing nucleic acid molecule. Such sample preparation components can be used to produce nucleic acid extracts (including DNA and/or RNA), proteins or membrane extracts from any bodily fluids (such as blood, serum, plasma, urine, saliva, phlegm, gastric juices, semen, tears, sweat, etc.), skin, hair, cells (especially nucleated cells), biopsies, buccal swabs or tissue specimens. The test samples used in the above-described methods will vary based on such factors as the assay format, nature of the detection method, and the specific tissues, cells or extracts used as the test sample to be assayed. Methods of preparing nucleic acids, proteins, and cell extracts are well known in the art and can be readily adapted to obtain a sample that is compatible with the system utilized. Automated sample preparation systems for extracting nucleic acids from a test sample are commercially available, and examples are Qiagen's BioRobot 9600, Applied Biosystems' PRISM™ 6700 sample preparation system, and Roche Molecular Systems' COBAS AmpliPrep System.

[0151] Another form of kit contemplated by the present invention is a compartmentalized kit. A compartmentalized kit includes any kit in which reagents are contained in separate containers. Such containers include, for example, small glass containers, plastic containers, strips of plastic, glass or paper, or arraying material such as silica. Such containers allow one to efficiently transfer reagents from one compartment to another compartment such that the test samples and reagents are not cross-contaminated, or from one container to another vessel not included in the kit, and the agents or solutions of each container can be added in a quantitative fashion from one compartment to another or to another vessel. Such containers may include, for example, one or more containers which will accept the test sample, one or more containers which contain at least one probe or other SNP detection reagent for detecting one or more SNPs of the present invention, one or more containers which contain wash reagents (such as phosphate buffered saline, Tris-buffers, etc.), and one or more containers which contain the reagents used to reveal the presence of the bound probe or other SNP detection reagents. The kit can optionally further comprise compartments and/or reagents for, for example, nucleic acid amplification or other enzymatic reactions such as primer extension reactions, hybridization, ligation, electrophoresis (preferably capillary electrophoresis), mass spectrometry, and/or laser-induced fluorescent detection. The kit may also include instructions for using the kit. Exemplary compartmentalized kits include microfluidic devices known in the art (see, e.g., Weigl et al., “Lab-on-a-chip for drug development”, Adv Drug Deliv Rev. 2003 Feb. 24; 55(3):349-77). In such microfluidic devices, the containers may be referred to as, for example, microfluidic “compartments”, “chambers”, or “channels”.

[0152] Microfluidic devices, which may also be referred to as “lab-on-a-chip” systems, biomedical micro-electro-mechanical systems (bioMEMs), or multicomponent integrated systems, are exemplary kits/systems of the present invention for analyzing SNPs. Such systems miniaturize and compartmentalize processes such as probe/target hybridization, nucleic acid amplification, and capillary electrophoresis reactions in a single functional device. Such microfluidic devices typically utilize detection reagents in at least one aspect of the system, and such detection reagents may be used to detect one or more SNPs of the present invention. One example of a microfluidic system is disclosed in U.S. Pat. No. 5,589,136, which describes the integration of PCR amplification and capillary electrophoresis in chips. Exemplary microfluidic systems comprise a pattern of microchannels designed onto a glass, silicon, quartz, or plastic wafer included on a microchip. The movements of the samples may be controlled by electric, electroosmotic or hydrostatic forces applied across different areas of the microchip to create functional microscopic valves and pumps with no moving parts. Varying the voltage can be used as a means to control the liquid flow at intersections between the micro-machined channels and to change the liquid flow rate for pumping across different sections of the microchip. See, for example, U.S. Pat. No. 6,153,073, Dubrow et al., and U.S. Pat. No. 6,156,181, Parce et al.

[0153] For genotyping SNPs, an exemplary microfluidic system may integrate, for example, nucleic acid amplification, primer extension, capillary electrophoresis, and a detection method such as laser induced fluorescence detection. In a first step of an exemplary process for using such an exemplary system, nucleic acid samples are amplified, preferably by PCR. Then, the amplification products are subjected to automated primer extension reactions using ddNTPs (specific fluorescence for each ddNTP) and the appropriate oligonucleotide primers to carry out primer extension reactions which hybridize just upstream of the targeted SNP. Once the extension at the 3′ end is completed, the primers are separated from the unincorporated fluorescent ddNTPs by capillary electrophoresis. The separation medium used in capillary electrophoresis can be, for example, polyacrylamide, polyethyleneglycol or dextran. The incorporated ddNTPs in the single nucleotide primer extension products are identified by laser-induced fluorescence detection. Such an exemplary microchip can be used to process, for example, at least 96 to 384 samples, or more, in parallel.

[0154] Uses of Nucleic Acid Molecules

[0155] The nucleic acid molecules of the present invention have a variety of uses, especially in the diagnosis and treatment of liver fibrosis and related pathologies. For example, the nucleic acid molecules are useful as hybridization probes, such as for genotyping SNPs in messenger RNA, transcript, cDNA, genomic DNA, amplified DNA or other nucleic acid molecules, and for isolating full-length cDNA and genomic clones encoding the variant peptides disclosed in Table 1 as well as their orthologs.

[0156] A probe can hybridize to any nucleotide sequence along the entire length of a nucleic acid molecule provided in Table 1 and/or Table 2. Preferably, a probe of the present invention hybridizes to a region of a target sequence that encompasses a SNP position indicated in Table 1 and/or Table 2. More preferably, a probe hybridizes to a SNP-containing target sequence in a sequence-specific manner such that it distinguishes the target sequence from other nucleotide sequences which vary from the target sequence only by which nucleotide is present at the SNP site. Such a probe is particularly useful for detecting the presence of a SNP-containing nucleic acid in a test sample, or for determining which nucleotide (allele) is present at a particular SNP site (i.e., genotyping the SNP site).

[0157] A nucleic acid hybridization probe may be used for determining the presence, level, form, and/or distribution of nucleic acid expression. The nucleic acid whose level is determined can be DNA or RNA. Accordingly, probes specific for the SNPs described herein can be used to assess the presence, expression and/or gene copy number in a given cell, tissue, or organism. These uses are relevant for diagnosis of disorders involving an increase or decrease in gene expression relative to normal levels. In vitro techniques for detection of mRNA include, for example, Northern blot hybridizations and in situ hybridizations. In vitro techniques for detecting DNA include Southern blot hybridizations and in situ hybridizations (Sambrook and Russell, 2000, Molecular Cloning: A Laboratory Manual, Cold Spring Harbor Press, Cold Spring Harbor, N.Y.).

[0158] Probes can be used as part of a diagnostic test kit for identifying cells or tissues in which a variant protein is expressed, such as by measuring the level of a variant protein-encoding nucleic acid (e.g., mRNA) in a sample of cells from a subject or determining if a polynucleotide contains a SNP of interest.

[0159] Thus, the nucleic acid molecules of the invention can be used as hybridization probes to detect the SNPs disclosed herein, thereby determining whether an individual with the polymorphisms is at risk for liver fibrosis and related pathologies or has developed early stage liver fibrosis. Detection of a SNP associated with a disease phenotype provides a diagnostic tool for an active disease and/or genetic predisposition to the disease.

[0160] Furthermore, the nucleic acid molecules of the invention are therefore useful for detecting a gene (gene information is disclosed in Table 2, for example) which contains a SNP disclosed herein and/or products of such genes, such as expressed mRNA transcript molecules (transcript information is disclosed in Table 1, for example), and are thus useful for detecting gene expression. The nucleic acid molecules can optionally be implemented in, for example, an array or kit format for use in detecting gene expression.

[0161] The nucleic acid molecules of the invention are also useful as primers to amplify any given region of a nucleic acid molecule, particularly a region containing a SNP identified in Table 1 and/or Table 2.

[0162] The nucleic acid molecules of the invention are also useful for constructing recombinant vectors (described in greater detail below). Such vectors include expression vectors that express a portion of, or all of, any of the variant peptide sequences provided in Table 1. Vectors also include insertion vectors, used to integrate into another nucleic acid molecule sequence, such as into the cellular genome, to alter in situ expression of a gene and/or gene product. For example, an endogenous coding sequence can be replaced via homologous recombination with all or part of the coding region containing one or more specifically introduced SNPs.

[0163] The nucleic acid molecules of the invention are also useful for expressing antigenic portions of the variant proteins, particularly antigenic portions that contain a variant amino acid sequence (e.g., an amino acid substitution) caused by a SNP disclosed in Table 1 and/or Table 2.

[0164] The nucleic acid molecules of the invention are also useful for constructing vectors containing a gene regulatory region of the nucleic acid molecules of the present invention.

[0165] The nucleic acid molecules of the invention are also useful for designing ribozymes corresponding to all, or a part, of an mRNA molecule expressed from a SNP-containing nucleic acid molecule described herein.

[0166] The nucleic acid molecules of the invention are also useful for constructing host cells expressing a part, or all, of the nucleic acid molecules and variant peptides.

[0167] The nucleic acid molecules of the invention are also useful for constructing transgenic animals expressing all, or a part, of the nucleic acid molecules and variant peptides. The production of recombinant cells and transgenic animals having nucleic acid molecules which contain the SNPs disclosed in Table 1 and/or Table 2 allow, for example, effective clinical design of treatment compounds and dosage regimens.

[0168] The nucleic acid molecules of the invention are also useful in assays for drug screening to identify compounds that, for example, modulate nucleic acid expression.

[0169] The nucleic acid molecules of the invention are also useful in gene therapy in patients whose cells have aberrant gene expression. Thus, recombinant cells, which include a patient's cells that have been engineered ex vivo and returned to the patient, can be introduced into an individual where the recombinant cells produce the desired protein to treat the individual.

[0170] SNP Genotyping Methods

[0171] The process of determining which specific nucleotide (i.e., allele) is present at each of one or more SNP positions, such as a SNP position in a nucleic acid molecule disclosed in Table 1 and/or Table 2, is referred to as SNP genotyping. The present invention provides methods of SNP genotyping, such as for use in screening for liver fibrosis or related pathologies, or determining predisposition thereto, or determining responsiveness to a form of treatment, or in genome mapping or SNP association analysis, etc.

[0172] Nucleic acid samples can be genotyped to determine which allele(s) is/are present at any given genetic region (e.g., SNP position) of interest by methods well known in the art. The neighboring sequence can be used to design SNP detection reagents such as oligonucleotide probes, which may optionally be implemented in a kit format. Exemplary SNP genotyping methods are described in Chen et al., “Single nucleotide polymorphism genotyping: biochemistry, protocol, cost and throughput”, Pharmacogenomics J. 2003; 3(2):77-96; Kwok et al., “Detection of single nucleotide polymorphisms”, Curr Issues Mol Biol. 2003 April; 5(2):43-60; Shi, “Technologies for individual genotyping: detection of genetic polymorphisms in drug targets and disease genes”, Am J Pharmacogenomics. 2002; 2(3):197-205; and Kwok, “Methods for genotyping single nucleotide polymorphisms”, Annu Rev Genomics Hum Genet 2001; 2:235-58. Exemplary techniques for high-throughput SNP genotyping are described in Marnellos, “High-throughput SNP analysis for genetic association studies”, Curr Opin Drug Discov Devel. 2003 May; 6(3):317-21. Common SNP genotyping methods include, but are not limited to, TaqMan assays, molecular beacon assays, nucleic acid arrays, allele-specific primer extension, allele-specific PCR, arrayed primer extension, homogeneous primer extension assays, primer extension with detection by mass spectrometry, pyrosequencing, multiplex primer extension sorted on genetic arrays, ligation with rolling circle amplification, homogeneous ligation, OLA (U.S. Pat. No. 4,988,167), multiplex ligation reaction sorted on genetic arrays, restriction-fragment length polymorphism, single base extension-tag assays, and the Invader assay. Such methods may be used in combination with detection mechanisms such as, for example, luminescence or chemiluminescence detection, fluorescence detection, time-resolved fluorescence detection, fluorescence resonance energy transfer, fluorescence polarization, mass spectrometry, and electrical detection.

[0173] Various methods for detecting polymorphisms include, but are not limited to, methods in which protection from cleavage agents is used to detect mismatched bases in RNA/RNA or RNA/DNA duplexes (Myers et al., Science 230:1242 (1985); Cotton et al., PNAS 85:4397 (1988); and Saleeba et al., Meth. Enzymol. 217:286-295 (1992)), comparison of the electrophoretic mobility of variant and wild type nucleic acid molecules (Orita et al., PNAS 86:2766 (1989); Cotton et al., Mutat. Res. 285:125-144 (1993); and Hayashi et al., Genet. Anal. Tech. Appl. 9:73-79 (1992)), and assaying the movement of polymorphic or wild-type fragments in polyacrylamide gels containing a gradient of denaturant using denaturing gradient gel electrophoresis (DGGE) (Myers et al., Nature 313:495 (1985)). Sequence variations at specific locations can also be assessed by nuclease protection assays such as RNase and S1 protection or chemical cleavage methods.

[0174] In a preferred embodiment, SNP genotyping is performed using the TaqMan assay, which is also known as the 5′ nuclease assay (U.S. Pat. Nos. 5,210,015 and 5,538,848). The TaqMan assay detects the accumulation of a specific amplified product during PCR. The TaqMan assay utilizes an oligonucleotide probe labeled with a fluorescent reporter dye and a quencher dye. The reporter dye is excited by irradiation at an appropriate wavelength, it transfers energy to the quencher dye in the same probe via a process called fluorescence resonance energy transfer (FRET). When attached to the probe, the excited reporter dye does not emit a signal. The proximity of the quencher dye to the reporter dye in the intact probe maintains a reduced fluorescence for the reporter. The reporter dye and quencher dye may be at the 5′ most and the 3′ most ends, respectively, or vice versa. Alternatively, the reporter dye may be at the 5′ or 3′ most end while the quencher dye is attached to an internal nucleotide, or vice versa. In yet another embodiment, both the reporter and the quencher may be attached to internal nucleotides at a distance from each other such that fluorescence of the reporter is reduced.

[0175] During PCR, the 5′ nuclease activity of DNA polymerase cleaves the probe, thereby separating the reporter dye and the quencher dye and resulting in increased fluorescence of the reporter. Accumulation of PCR product is detected directly by monitoring the increase in fluorescence of the reporter dye. The DNA polymerase cleaves the probe between the reporter dye and the quencher dye only if the probe hybridizes to the target SNP-containing template which is amplified during PCR, and the probe is designed to hybridize to the target SNP site only if a particular SNP allele is present.

[0176] Preferred TaqMan primer and probe sequences can readily be determined using the SNP and associated nucleic acid sequence information provided herein. A number of computer programs, such as Primer Express (Applied Biosystems, Foster City, Calif.), can be used to rapidly obtain optimal primer/probe sets. It will be apparent to one of skill in the art that such primers and probes for detecting the SNPs of the present invention are useful in diagnostic assays for liver fibrosis and related pathologies, and can be readily incorporated into a kit format. The present invention also includes modifications of the Taqman assay well known in the art such as the use of Molecular Beacon probes (U.S. Pat. Nos. 5,118,801 and 5,312,728) and other variant formats (U.S. Pat. Nos. 5,866,336 and 6,117,635).

[0177] Another preferred method for genotyping the SNPs of the present invention is the use of two oligonucleotide probes in an OLA (see, e.g., U.S. Pat. No. 4,988,617). In this method, one probe hybridizes to a segment of a target nucleic acid with its 3′ most end aligned with the SNP site. A second probe hybridizes to an adjacent segment of the target nucleic acid molecule directly 3′ to the first probe. The two juxtaposed probes hybridize to the target nucleic acid molecule, and are ligated in the presence of a linking agent such as a ligase if there is perfect complementarity between the 3′ most nucleotide of the first probe with the SNP site. If there is a mismatch, ligation would not occur. After the reaction, the ligated probes are separated from the target nucleic acid molecule, and detected as indicators of the presence of a SNP.

[0178] The following patents, patent applications, and published international patent applications, which are all hereby incorporated by reference, provide additional information pertaining to techniques for carrying out various types of OLA: U.S. Pat. Nos. 6,027,889, 6,268,148, 5,494,810, 5,830,711, and 6,054,564 describe OLA strategies for performing SNP detection; WO 97/31256 and WO 00/56927 describe OLA strategies for performing SNP detection using universal arrays, wherein a zipcode sequence can be introduced into one of the hybridization probes, and the resulting product, or amplified product, hybridized to a universal zip code array; U.S. application Ser. No. 01/173,29 (and Ser. No. 09/584,905) describes OLA (or LDR) followed by PCR, wherein zipcodes are incorporated into OLA probes, and amplified PCR products are determined by electrophoretic or universal zipcode array readout; U.S. applications 60/427,818, 60/445,636, and 60/445,494 describe SNPlex methods and software for multiplexed SNP detection using OLA followed by PCR, wherein zipcodes are incorporated into OLA probes, and amplified PCR products are hybridized with a zipchute reagent, and the identity of the SNP determined from electrophoretic readout of the zipchute. In some embodiments, OLA is carried out prior to PCR (or another method of nucleic acid amplification). In other embodiments, PCR (or another method of nucleic acid amplification) is carried out prior to OLA.

[0179] Another method for SNP genotyping is based on mass spectrometry. Mass spectrometry takes advantage of the unique mass of each of the four nucleotides of DNA. SNPs can be unambiguously genotyped by mass spectrometry by measuring the differences in the mass of nucleic acids having alternative SNP alleles. MALDI-TOF (Matrix Assisted Laser Desorption Ionization-Time of Flight) mass spectrometry technology is preferred for extremely precise determinations of molecular mass, such as SNPs. Numerous approaches to SNP analysis have been developed based on mass spectrometry. Preferred mass spectrometry-based methods of SNP genotyping include primer extension assays, which can also be utilized in combination with other approaches, such as traditional gel-based formats and microarrays.

[0180] Typically, the primer extension assay involves designing and annealing a primer to a template PCR amplicon upstream (5′) from a target SNP position. A mix of dideoxynucleotide triphosphates (ddNTPs) and/or deoxynucleotide triphosphates (dNTPs) are added to a reaction mixture containing template (e.g., a SNP-containing nucleic acid molecule which has typically been amplified, such as by PCR), primer, and DNA polymerase. Extension of the primer terminates at the first position in the template where a nucleotide complementary to one of the ddNTPs in the mix occurs. The primer can be either immediately adjacent (i.e., the nucleotide at the 3′ end of the primer hybridizes to the nucleotide next to the target SNP site) or two or more nucleotides removed from the SNP position. If the primer is several nucleotides removed from the target SNP position, the only limitation is that the template sequence between the 3′ end of the primer and the SNP position cannot contain a nucleotide of the same type as the one to be detected, or this will cause premature termination of the extension primer. Alternatively, if all four ddNTPs alone, with no dNTPs, are added to the reaction mixture, the primer will always be extended by only one nucleotide, corresponding to the target SNP position. In this instance, primers are designed to bind one nucleotide upstream from the SNP position (i.e., the nucleotide at the 3′ end of the primer hybridizes to the nucleotide that is immediately adjacent to the target SNP site on the 5′ side of the target SNP site). Extension by only one nucleotide is preferable, as it minimizes the overall mass of the extended primer, thereby increasing the resolution of mass differences between alternative SNP nucleotides. Furthermore, mass-tagged ddNTPs can be employed in the primer extension reactions in place of unmodified ddNTPs. This increases the mass difference between primers extended with these ddNTPs, thereby providing increased sensitivity and accuracy, and is particularly useful for typing heterozygous base positions. Mass-tagging also alleviates the need for intensive sample-preparation procedures and decreases the necessary resolving power of the mass spectrometer.

[0181] The extended primers can then be purified and analyzed by MALDI-TOF mass spectrometry to determine the identity of the nucleotide present at the target SNP position. In one method of analysis, the products from the primer extension reaction are combined with light absorbing crystals that form a matrix. The matrix is then hit with an energy source such as a laser to ionize and desorb the nucleic acid molecules into the gas-phase. The ionized molecules are then ejected into a flight tube and accelerated down the tube towards a detector. The time between the ionization event, such as a laser pulse, and collision of the molecule with the detector is the time of flight of that molecule. The time of flight is precisely correlated with the mass-to-charge ratio (m/z) of the ionized molecule. Ions with smaller m/z travel down the tube faster than ions with larger m/z and therefore the lighter ions reach the detector before the heavier ions. The time-of-flight is then converted into a corresponding, and highly precise, m/z. In this manner, SNPs can be identified based on the slight differences in mass, and the corresponding time of flight differences, inherent in nucleic acid molecules having different nucleotides at a single base position. For further information regarding the use of primer extension assays in conjunction with MALDI-TOF mass spectrometry for SNP genotyping, see, e.g., Wise et al., “A standard protocol for single nucleotide primer extension in the human genome using matrix-assisted laser desorption/ionization time-of-flight mass spectrometry”, Rapid Commun Mass Spectrom. 2003; 17(11):1195-202.

[0182] The following references provide further information describing mass spectrometry-based methods for SNP genotyping: Bocker, “SNP and mutation discovery using base-specific cleavage and MALDI-TOF mass spectrometry”, Bioinformatics. 2003 July; 19 Suppl 1:144-153; Storm et al., “MALDI-TOF mass spectrometry-based SNP genotyping”, Methods Mol Biol. 2003; 212:241-62; Jurinke et al., “The use of Mass ARRAY technology for high throughput genotyping”, Adv Biochem Eng Biotechnol. 2002; 77:57-74; and Jurinke et al., “Automated genotyping using the DNA MassArray technology”, Methods Mol Biol. 2002; 187:179-92.

[0183] SNPs can also be scored by direct DNA sequencing. A variety of automated sequencing procedures can be utilized ((1995) Biotechniques 19:448), including sequencing by mass spectrometry (see, e.g., PCT International Publication No. WO94/16101; Cohen et al., Adv. Chromatogr. 36:127-162 (1996); and Griffin et al., Appl. Biochem. Biotechnol. 38:147-159 (1993)). The nucleic acid sequences of the present invention enable one of ordinary skill in the art to readily design sequencing primers for such automated sequencing procedures. Commercial instrumentation, such as the Applied Biosystems 377, 3100, 3700, 3730, and 3730x1 DNA Analyzers (Foster City, Calif.), is commonly used in the art for automated sequencing.

[0184] Other methods that can be used to genotype the SNPs of the present invention include single-strand conformational polymorphism (SSCP), and denaturing gradient gel electrophoresis (DGGE) (Myers et al., Nature 313:495 (1985)). SSCP identifies base differences by alteration in electrophoretic migration of single stranded PCR products, as described in Orita et al., Proc. Nat. Acad. Single-stranded PCR products can be generated by heating or otherwise denaturing double stranded PCR products. Single-stranded nucleic acids may refold or form secondary structures that are partially dependent on the base sequence. The different electrophoretic mobilities of single-stranded amplification products are related to base-sequence differences at SNP positions. DGGE differentiates SNP alleles based on the different sequence-dependent stabilities and melting properties inherent in polymorphic DNA and the corresponding differences in electrophoretic migration patterns in a denaturing gradient gel (Erlich, ed., PCR Technology, Principles and Applications for DNA Amplification, W.H. Freeman and Co, New York, 1992, Chapter 7).

[0185] Sequence-specific ribozymes (U.S. Pat. No. 5,498,531) can also be used to score SNPs based on the development or loss of a ribozyme cleavage site. Perfectly matched sequences can be distinguished from mismatched sequences by nuclease cleavage digestion assays or by differences in melting temperature. If the SNP affects a restriction enzyme cleavage site, the SNP can be identified by alterations in restriction enzyme digestion patterns, and the corresponding changes in nucleic acid fragment lengths determined by gel electrophoresis

[0186] SNP genotyping can include the steps of, for example, collecting a biological sample from a human subject (e.g., sample of tissues, cells, fluids, secretions, etc.), isolating nucleic acids (e.g., genomic DNA, mRNA or both) from the cells of the sample, contacting the nucleic acids with one or more primers which specifically hybridize to a region of the isolated nucleic acid containing a target SNP under conditions such that hybridization and amplification of the target nucleic acid region occurs, and determining the nucleotide present at the SNP position of interest, or, in some assays, detecting the presence or absence of an amplification product (assays can be designed so that hybridization and/or amplification will only occur if a particular SNP allele is present or absent). In some assays, the size of the amplification product is detected and compared to the length of a control sample; for example, deletions and insertions can be detected by a change in size of the amplified product compared to a normal genotype.

[0187] SNP genotyping is useful for numerous practical applications, as described below. Examples of such applications include, but are not limited to, SNP-disease association analysis, disease predisposition screening, disease diagnosis, disease prognosis, disease progression monitoring, determining therapeutic strategies based on an individual's genotype (“pharmacogenomics”), developing therapeutic agents based on SNP genotypes associated with a disease or likelihood of responding to a drug, stratifying a patient population for clinical trial for a treatment regimen, predicting the likelihood that an individual will experience toxic side effects from a therapeutic agent, and human identification applications such as forensics.

[0188] Analysis of Genetic Association Between SNPs and Phenotypic Traits

[0189] SNP genotyping for disease diagnosis, disease predisposition screening, disease prognosis, determining drug responsiveness (pharmacogenomics), drug toxicity screening, and other uses described herein, typically relies on initially establishing a genetic association between one or more specific SNPs and the particular phenotypic traits of interest.

[0190] Different study designs may be used for genetic association studies (Modern Epidemiology, Lippincott Williams & Wilkins (1998), 609-622). Observational studies are most frequently carried out in which the response of the patients is not interfered with. The first type of observational study identifies a sample of persons in whom the suspected cause of the disease is present and another sample of persons in whom the suspected cause is absent, and then the frequency of development of disease in the two samples is compared. These sampled populations are called cohorts, and the study is a prospective study. The other type of observational study is case-control or a retrospective study. In typical case-control studies, samples are collected from individuals with the phenotype of interest (cases) such as certain manifestations of a disease, and from individuals without the phenotype (controls) in a population (target population) that conclusions are to be drawn from. Then the possible causes of the disease are investigated retrospectively. As the time and costs of collecting samples in case-control studies are considerably less than those for prospective studies, case-control studies are the more commonly used study design in genetic association studies, at least during the exploration and discovery stage.

[0191] In both types of observational studies, there may be potential confounding factors that should be taken into consideration. Confounding factors are those that are associated with both the real cause(s) of the disease and the disease itself, and they include demographic information such as age, gender, ethnicity as well as environmental factors. When confounding factors are not matched in cases and controls in a study, and are not controlled properly, spurious association results can arise. If potential confounding factors are identified, they should be controlled for by analysis methods explained below.

[0192] In a genetic association study, the cause of interest to be tested is a certain allele or a SNP or a combination of alleles or a haplotype from several SNPs. Thus, tissue specimens (e.g., whole blood) from the sampled individuals may be collected and genomic DNA genotyped for the SNP(s) of interest. In addition to the phenotypic trait of interest, other information such as demographic (e.g., age, gender, ethnicity, etc.), clinical, and environmental information that may influence the outcome of the trait can be collected to further characterize and define the sample set. In many cases, these factors are known to be associated with diseases and/or SNP allele frequencies. There are likely gene-environment and/or gene-gene interactions as well. Analysis methods to address gene-environment and gene-gene interactions (for example, the effects of the presence of both susceptibility alleles at two different genes can be greater than the effects of the individual alleles at two genes combined) are discussed below.

[0193] After all the relevant phenotypic and genotypic information has been obtained, statistical analyses are carried out to determine if there is any significant correlation between the presence of an allele or a genotype with the phenotypic characteristics of an individual. Preferably, data inspection and cleaning are first performed before carrying out statistical tests for genetic association. Epidemiological and clinical data of the samples can be summarized by descriptive statistics with tables and graphs. Data validation is preferably performed to check for data completion, inconsistent entries, and outliers. Chi-squared tests and t-tests (Wilcoxon rank-sum tests if distributions are not normal) may then be used to check for significant differences between cases and controls for discrete and continuous variables, respectively. To ensure genotyping quality, Hardy-Weinberg disequilibrium tests can be performed on cases and controls separately. Significant deviation from Hardy-Weinberg equilibrium (HWE) in both cases and controls for individual markers can be indicative of genotyping errors. If HWE is violated in a majority of markers, it is indicative of population substructure that should be further investigated. Moreover, Hardy-Weinberg disequilibrium in cases only can indicate genetic association of the markers with the disease (Genetic Data Analysis, Weir B., Sinauer (1990)).

[0194] To test whether an allele of a single SNP is associated with the case or control status of a phenotypic trait, one skilled in the art can compare allele frequencies in cases and controls. Standard chi-squared tests and Fisher exact tests can be carried out on a 2×2 table (2 SNP alleles×2 outcomes in the categorical trait of interest). To test whether genotypes of a SNP are associated, chi-squared tests can be carried out on a 3×2 table (3 genotypes×2 outcomes). Score tests are also carried out for genotypic association to contrast the three genotypic frequencies (major homozygotes, heterozygotes and minor homozygotes) in cases and controls, and to look for trends using 3 different modes of inheritance, namely dominant (with contrast coefficients 2, −1, −1), additive (with contrast coefficients 1, 0, −1) and recessive (with contrast coefficients 1, 1, −2). Odds ratios for minor versus major alleles, and odds ratios for heterozygote and homozygote variants versus the wild type genotypes are calculated with the desired confidence limits, usually 95%.

[0195] In order to control for confounders and to test for interaction and effect modifiers, stratified analyses may be performed using stratified factors that are likely to be confounding, including demographic information such as age, ethnicity, and gender, or an interacting element or effect modifier, such as a known major gene (e.g., APOE for Alzheimer's disease or HLA genes for autoimmune diseases), or environmental factors such as smoking in lung cancer. Stratified association tests may be carried out using Cochran-Mantel-Haenszel tests that take into account the ordinal nature of genotypes with 0, 1, and 2 variant alleles. Exact tests by StatXact may also be performed when computationally possible. Another way to adjust for confounding effects and test for interactions is to perform stepwise multiple logistic regression analysis using statistical packages such as SAS or R. Logistic regression is a model-building technique in which the best fitting and most parsimonious model is built to describe the relation between the dichotomous outcome (for instance, getting a certain disease or not) and a set of independent variables (for instance, genotypes of different associated genes, and the associated demographic and environmental factors). The most common model is one in which the logit transformation of the odds ratios is expressed as a linear combination of the variables (main effects) and their cross-product terms (interactions) (Applied Logistic Regression, Hosmer and Lemeshow, Wiley (2000)). To test whether a certain variable or interaction is significantly associated with the outcome, coefficients in the model are first estimated and then tested for statistical significance of their departure from zero.

[0196] In addition to performing association tests one marker at a time, haplotype association analysis may also be performed to study a number of markers that are closely linked together. Haplotype association tests can have better power than genotypic or allelic association tests when the tested markers are not the disease-causing mutations themselves but are in linkage disequilibrium with such mutations. The test will even be more powerful if the disease is indeed caused by a combination of alleles on a haplotype (e.g., APOE is a haplotype formed by 2 SNPs that are very close to each other). In order to perform haplotype association effectively, marker-marker linkage disequilibrium measures, both D′ and R², are typically calculated for the markers within a gene to elucidate the haplotype structure. Recent studies (Daly et al, Nature Genetics, 29, 232-235, 2001) in linkage disequilibrium indicate that SNPs within a gene are organized in block pattern, and a high degree of linkage disequilibrium exists within blocks and very little linkage disequilibrium exists between blocks. Haplotype association with the disease status can be performed using such blocks once they have been elucidated.

[0197] Haplotype association tests can be carried out in a similar fashion as the allelic and genotypic association tests. Each haplotype in a gene is analogous to an allele in a multi-allelic marker. One skilled in the art can either compare the haplotype frequencies in cases and controls or test genetic association with different pairs of haplotypes. It has been proposed (Schaid et al, Am. J. Hum. Genet., 70, 425-434, 2002) that score tests can be done on haplotypes using the program “haplo.score”. In that method, haplotypes are first inferred by EM algorithm and score tests are carried out with a generalized linear model (GLM) framework that allows the adjustment of other factors.

[0198] An important decision in the performance of genetic association tests is the determination of the significance level at which significant association can be declared when the p-value of the tests reaches that level. In an exploratory analysis where positive hits will be followed up in subsequent confirmatory testing, an unadjusted p-value <0.2 (a significance level on the lenient side), for example, may be used for generating hypotheses for significant association of a SNP with certain phenotypic characteristics of a disease. It is preferred that a p-value <0.05 (a significance level traditionally used in the art) is achieved in order for a SNP to be considered to have an association with a disease. It is more preferred that a p-value <0.01 (a significance level on the stringent side) is achieved for an association to be declared. When hits are followed up in confirmatory analyses in more samples of the same source or in different samples from different sources, adjustment for multiple testing will be performed as to avoid excess number of hits while maintaining the experiment-wise error rates at 0.05. While there are different methods to adjust for multiple testing to control for different kinds of error rates, a commonly used but rather conservative method is Bonferroni correction to control the experiment-wise or family-wise error rate (Multiple comparisons and multiple tests, Westfall et al, SAS Institute (1999)). Permutation tests to control for the false discovery rates, FDR, can be more powerful (Benjamini and Hochberg, Journal of the Royal Statistical Society, Series B 57, 1289-1300, 1995, Resampling-based Multiple Testing, Westfall and Young, Wiley (1993)). Such methods to control for multiplicity would be preferred when the tests are dependent and controlling for false discovery rates is sufficient as opposed to controlling for the experiment-wise error rates.

[0199] In replication studies using samples from different populations after statistically significant markers have been identified in the exploratory stage, meta-analyses can then be performed by combining evidence of different studies (Modern Epidemiology, Lippincott Williams & Wilkins, 1998, 643-673). If available, association results known in the art for the same SNPs can be included in the meta-analyses.

[0200] Since both genotyping and disease status classification can involve errors, sensitivity analyses may be performed to see how odds ratios and p-values would change upon various estimates on genotyping and disease classification error rates.

[0201] It has been well known that subpopulation-based sampling bias between cases and controls can lead to spurious results in case-control association studies (Ewens and Spielman, Am. J. Hum. Genet. 62, 450-458, 1995) when prevalence of the disease is associated with different subpopulation groups. Such bias can also lead to a loss of statistical power in genetic association studies. To detect population stratification, Pritchard and Rosenberg (Pritchard et al. Am. J. Hum. Gen. 1999, 65:220-228) suggested typing markers that are unlinked to the disease and using results of association tests on those markers to determine whether there is any population stratification. When stratification is detected, the genomic control (GC) method as proposed by Devlin and Roeder (Devlin et al. Biometrics 1999, 55:997-1004) can be used to adjust for the inflation of test statistics due to population stratification. GC method is robust to changes in population structure levels as well as being applicable to DNA pooling designs (Devlin et al. Genet. Epidem. 20001, 21:273-284).

[0202] While Pritchard's method recommended using 15-20 unlinked microsatellite markers, it suggested using more than 30 biallelic markers to get enough power to detect population stratification. For the GC method, it has been shown (Bacanu et al. Am. J. Hum. Genet. 2000, 66:1933-1944) that about 60-70 biallelic markers are sufficient to estimate the inflation factor for the test statistics due to population stratification. Hence, 70 intergenic SNPs can be chosen in unlinked regions as indicated in a genome scan (Kehoe et al. Hum. Mol. Genet. 1999, 8:237-245).

[0203] Once individual risk factors, genetic or non-genetic, have been found for the predisposition to disease, the next step is to set up a classification/prediction scheme to predict the category (for instance, disease or no-disease) that an individual will be in depending on his genotypes of associated SNPs and other non-genetic risk factors. Logistic regression for discrete trait and linear regression for continuous trait are standard techniques for such tasks (Applied Regression Analysis, Draper and Smith, Wiley (1998)). Moreover, other techniques can also be used for setting up classification. Such techniques include, but are not limited to, MART, CART, neural network, and discriminant analyses that are suitable for use in comparing the performance of different methods (The Elements of Statistical Learning, Hastie, Tibshirani & Friedman, Springer (2002)).

[0204] Disease Diagnosis and Predisposition Screening

[0205] Information on association/correlation between genotypes and disease-related phenotypes can be exploited in several ways. For example, in the case of a highly statistically significant association between one or more SNPs with predisposition to a disease for which treatment is available, detection of such a genotype pattern in an individual may justify immediate administration of treatment, or at least the institution of regular monitoring of the individual. Detection of the susceptibility alleles associated with serious disease in a couple contemplating having children may also be valuable to the couple in their reproductive decisions. In the case of a weaker but still statistically significant association between a SNP and a human disease, immediate therapeutic intervention or monitoring may not be justified after detecting the susceptibility allele or SNP. Nevertheless, the subject can be motivated to begin simple life-style changes (e.g., diet, exercise) that can be accomplished at little or no cost to the individual but would confer potential benefits in reducing the risk of developing conditions for which that individual may have an increased risk by virtue of having the susceptibility allele(s).

[0206] The SNPs of the invention may contribute to liver fibrosis and related pathologies in an individual in different ways. Some polymorphisms occur within a protein coding sequence and contribute to disease phenotype by affecting protein structure. Other polymorphisms occur in noncoding regions but may exert phenotypic effects indirectly via influence on, for example, replication, transcription, and/or translation. A single SNP may affect more than one phenotypic trait. Likewise, a single phenotypic trait may be affected by multiple SNPs in different genes.

[0207] As used herein, the terms “diagnose”, “diagnosis”, and “diagnostics” include, but are not limited to any of the following: detection of liver fibrosis that an individual may presently have, predisposition/susceptibility screening (i.e., determining the increased risk of an individual in developing liver fibrosis in the future, or determining whether an individual has a decreased risk of developing liver fibrosis in the future, determining the rate of progression of fibrosis to bridging fibrosis/cirrhosis), determining a particular type or subclass of liver fibrosis in an individual known to have liver fibrosis, confirming or reinforcing a previously made diagnosis of liver fibrosis, pharmacogenomic evaluation of an individual to determine which therapeutic strategy that individual is most likely to positively respond to or to predict whether a patient is likely to respond to a particular treatment, predicting whether a patient is likely to experience toxic effects from a particular treatment or therapeutic compound, and evaluating the future prognosis of an individual having liver fibrosis. Such diagnostic uses are based on the SNPs individually or in a unique combination or SNP haplotypes of the present invention.

[0208] Haplotypes are particularly useful in that, for example, fewer SNPs can be genotyped to determine if a particular genomic region harbors a locus that influences a particular phenotype, such as in linkage disequilibrium-based SNP association analysis.

[0209] Linkage disequilibrium (LD) refers to the co-inheritance of alleles (e.g., alternative nucleotides) at two or more different SNP sites at frequencies greater than would be expected from the separate frequencies of occurrence of each allele in a given population. The expected frequency of co-occurrence of two alleles that are inherited independently is the frequency of the first allele multiplied by the frequency of the second allele. Alleles that co-occur at expected frequencies are said to be in “linkage equilibrium”. In contrast, LD refers to any non-random genetic association between allele(s) at two or more different SNP sites, which is generally due to the physical proximity of the two loci along a chromosome. LD can occur when two or more SNPs sites are in close physical proximity to each other on a given chromosome and therefore alleles at these SNP sites will tend to remain unseparated for multiple generations with the consequence that a particular nucleotide (allele) at one SNP site will show a non-random association with a particular nucleotide (allele) at a different SNP site located nearby. Hence, genotyping one of the SNP sites will give almost the same information as genotyping the other SNP site that is in LD.

[0210] Various degrees of LD can be encountered between two or more SNPs with the result being that some SNPs are more closely associated (i.e., in stronger LD) than others. Furthermore, the physical distance over which LD extends along a chromosome differs between different regions of the genome, and therefore the degree of physical separation between two or more SNP sites necessary for LD to occur can differ between different regions of the genome.

[0211] For diagnostic purposes and similar uses, if a particular SNP site is found to be useful for diagnosing liver fibrosis and related pathologies (e.g., has a significant statistical association with the condition and/or is recognized as a causative polymorphism for the condition), then the skilled artisan would recognize that other SNP sites which are in LD with this SNP site would also be useful for diagnosing the condition. Thus, polymorphisms (e.g., SNPs and/or haplotypes) that are not the actual disease-causing (causative) polymorphisms, but are in LD with such causative polymorphisms, are also useful. In such instances, the genotype of the polymorphism(s) that is/are in LD with the causative polymorphism is predictive of the genotype of the causative polymorphism and, consequently, predictive of the phenotype (e.g., liver fibrosis) that is influenced by the causative SNP(s). Therefore, polymorphic markers that are in LD with causative polymorphisms are useful as diagnostic markers, and are particularly useful when the actual causative polymorphism(s) is/are unknown.

[0212] Examples of polymorphisms that can be in LD with one or more causative polymorphisms (and/or in LD with one or more polymorphisms that have a significant statistical association with a condition) and therefore useful for diagnosing the same condition that the causative/associated SNP(s) is used to diagnose, include, for example, other SNPs in the same gene, protein-coding, or mRNA transcript-coding region as the causative/associated SNP, other SNPs in the same exon or same intron as the causative/associated SNP, other SNPs in the same haplotype block as the causative/associated SNP, other SNPs in the same intergenic region as the causative/associated SNP, SNPs that are outside but near a gene (e.g., within 6 kb on either side, 5′ or 3′, of a gene boundary) that harbors a causative/associated SNP, etc. Such useful LD SNPs can be selected from among the SNPs disclosed in Tables 1-4, and 11, for example.

[0213] Linkage disequilibrium in the human genome is reviewed in the following references: Wall et al. et al., “Haplotype blocks and linkage disequilibrium in the human genome,”, Nat Rev Genet. 2003 August; 4(8):587-97 (August 2003); Garner et al. et al., “On selecting markers for association studies: patterns of linkage disequilibrium between two and three diallelic loci,”, Genet Epidemiol. 2003 January; 24(1):57-67 (January 2003); Ardlie et al. et al., “Patterns of linkage disequilibrium in the human genome,”, Nat Rev Genet. 2002 April; 3(4):299-309 (April 2002); (erratum in Nat Rev Genet 2002 July; 3(7):566 (July 2002); and Remm et al. et al., “High-density genotyping and linkage disequilibrium in the human genome using chromosome 22 as a model,”; Curr Opin Chem Biol. 2002 February; 6(1):24-30 (February 2002); J. B. S. Haldane, “J B S (1919) The combination of linkage values, and the calculation of distances between the loci of linked factors,”. J Genet 8:299-309 (1919); G. Mendel, G. (1866) Versuche über Pflanzen-Hybriden. Verhandlungen des naturforschenden Vereines in Brünn [(Proceedings of the Natural History Society of Brünn)] (1866); Lewin B (1990) Genes IV, B. Lewin, ed., Oxford University Press, New York, USA (1990); D. L. Hartl D L and A. G. Clark A G (1989) Principles of Population Genetics 2^{nd} ed., Sinauer Associates, Inc., Ma Sunderland, Mass., USA (1989); J. H. Gillespie J H (2004) Population Genetics: A Concise Guide. 2^{nd} ed., Johns Hopkins University Press. (2004) USA; R. C. Lewontin, “RC (1964) The interaction of selection and linkage. I. General considerations; heterotic models,”. Genetics 49:49-67 (1964); P. G. Hoel, P G (1954) Introduction to Mathematical Statistics 2^{nd} ed., John Wiley & Sons, Inc., N.Y. New York, USA (1954); R. R. Hudson, R R “(2001) Two-locus sampling distributions and their application,”. Genetics 159:1805-1817 (2001); A. P. Dempster A P, N. M. Laird, D. B. N M, Rubin, “DB (1977) Maximum likelihood from incomplete data via the EM algorithm,”. J R Stat Soc 39:1-38 (1977); L. Excoffier L, M. Slatkin, M “(1995) Maximum-likelihood estimation of molecular haplotype frequencies in a diploid population,”. Mol Biol Evol 12(5):921-927 (1995); D. A. Tregouet D A, S. Escolano S, L. Tiret L, A. Mallet A, J. L. Golmard, J L “(2004) A new algorithm for haplotype-based association analysis: the Stochastic-EM algorithm,”. Ann Hum Genet 68(Pt 2):165-177 (2004); A. D. Long A D and C. H. Langley C H, “(1999) The power of association studies to detect the contribution of candidate genetic loci to variation in complex traits,”. Genome Research 9:720-731 (1999); A. Agresti, A (1990) Categorical Data Analysis, John Wiley & Sons, Inc., N.Y. New York, USA (1990); K. Lange, K (1997) Mathematical and Statistical Methods for Genetic Analysis, Springer-Verlag New York, Inc., N.Y. N.Y., USA (1997); The International HapMap Consortium, “(2003) The International HapMap Project,”. Nature 426:789-796 (2003); The International HapMap Consortium, “(2005) A haplotype map of the human genome,”. Nature 437:1299-1320 (2005); G. A. Thorisson G A, A. V. Smith A V, L. Krishnan L, L. D. Stein L D (2005), “The International HapMap Project Web Site,”. Genome Research 15:1591-1593 (2005); G. McVean, C. C. A. G, Spencer C C A, R. Chaix R (2005), “Perspectives on human genetic variation from the HapMap project,”. PLoS Genetics 1(4):413-418 (2005); J. N. Hirschhorn J N, M. J. Daly, M J “(2005) Genome-wide association studies for common diseases and complex traits,”. Nat Genet 6:95-108 (2005); S. J. Schrodi, “SJ (2005) A probabilistic approach to large-scale association scans: a semi-Bayesian method to detect disease-predisposing alleles,”. SAGMB 4(1):31 (2005); W. Y. S. Wang W Y S, B. J. Barratt B J, D. G. Clayton D G, J. A. Todd, “JA (2005) Genome-wide association studies: theoretical and practical concerns,”. Nat Rev Genet 6:109-118 (2005); J. K. Pritchard J K, M. Przeworski, “M (2001) Linkage disequilibrium in humans: models and data,”. Am J Hum Genet 69:1-14 (2001).

[0214] As discussed above, one aspect of the present invention is the discovery that SNPs which are in certain LD distance with the interrogated SNP can also be used as valid markers for identifying an increased or decreased risks of having or developing CHD. As used herein, the term “interrogated SNP” refers to SNPs that have been found to be associated with an increased or decreased risk of disease using genotyping results and analysis, or other appropriate experimental method as exemplified in the working examples described in this application. As used herein, the term “LD SNP” refers to a SNP that has been characterized as a SNP associating with an increased or decreased risk of diseases due to their being in LD with the “interrogated SNP” under the methods of calculation described in the application. Below, applicants describe the methods of calculation with which one of ordinary skilled in the art may determine if a particular SNP is in LD with an interrogated SNP. The parameter r² is commonly used in the genetics art to characterize the extent of linkage disequilibrium between markers (Hudson, 2001). As used herein, the term “in LD with” refers to a particular SNP that is measured at above the threshold of a parameter such as r² with an interrogated SNP.

[0215] It is now common place to directly observe genetic variants in a sample of chromosomes obtained from a population. Suppose one has genotype data at two genetic markers located on the same chromosome, for the markers A and B. Further suppose that two alleles segregate at each of these two markers such that alleles A₁ and A₂ can be found at marker A and alleles B₁ and B₂ at marker B. Also assume that these two markers are on a human autosome. If one is to examine a specific individual and find that they are heterozygous at both markers, such that their two-marker genotype is A₁A₂B₁B₂, then there are two possible configurations: the individual in question could have the alleles A₁B₁ on one chromosome and A₂B₂ on the remaining chromosome; alternatively, the individual could have alleles A₁B₂ on one chromosome and A₂B₁ on the other. The arrangement of alleles on a chromosome is called a haplotype. In this illustration, the individual could have haplotypes A₁B₁/A₂B₂ or A₁B₂/A₂B₁ (see Hartl and Clark (1989) for a more complete description). The concept of linkage equilibrium relates the frequency of haplotypes to the allele frequencies.

[0216] Assume that a sample of individuals is selected from a larger population. Considering the two markers described above, each having two alleles, there are four possible haplotypes: A₁B₁, A₁B₂, A₂B₁ and A₂B₂. Denote the frequencies of these four haplotypes with the following notation.

P₁₁=freq(A₁B₁) (1)

P₁₂=freq(A₁B₂) (2)

P₂₁=freq(A₂B₁) (3)

P₂₂=freq(A₂B₂) (4)

The allele frequencies at the two markers are then the sum of different haplotype frequencies, it is straightforward to write down a similar set of equations relating single-marker allele frequencies to two-marker haplotype frequencies:

p₁=freq(A₁)=P₁₁+P₁₂ (5)

p₂=freq(A₂)=P₂₁+P₂₂ (6)

q₁=freq(B₁)=P₁₁+P₂₁ (7)

q₂=freq(B₂)=P₂+P₂₂ (8)

Note that the four haplotype frequencies and the allele frequencies at each marker must sum to a frequency of 1.

P₁₁+P₁₂+P₂₁+P₂₂=1 (9)

p₁+p₂=1 (10)

q₁+q₂=1 (11)

If there is no correlation between the alleles at the two markers, one would expect that the frequency of the haplotypes would be approximately the product of the composite alleles. Therefore,

P₁₁≈p₁q₁ (12)

P₁₂≈p₁q₂ (13)

P₂₁≈p₂q₁ (14)

P₂₂≈p₂q₂ (15)

These approximating equations (12)-(15) represent the concept of linkage equilibrium where there is independent assortment between the two markers—the alleles at the two markers occur together at random. These are represented as approximations because linkage equilibrium and linkage disequilibrium are concepts typically thought of as properties of a sample of chromosomes; and as such they are susceptible to stochastic fluctuations due to the sampling process. Empirically, many pairs of genetic markers will be in linkage equilibrium, but certainly not all pairs.

[0217] Having established the concept of linkage equilibrium above, applicants can now describe the concept of linkage disequilibrium (LD), which is the deviation from linkage equilibrium. Since the frequency of the A₁B₁ haplotype is approximately the product of the allele frequencies for A₁ and B₁ under the assumption of linkage equilibrium as stated mathematically in (12), a simple measure for the amount of departure from linkage equilibrium is the difference in these two quantities, D,

D=P₁₁−p₁q₁ (16)

D=0 indicates perfect linkage equilibrium. Substantial departures from D=0 indicates LD in the sample of chromosomes examined. Many properties of D are discussed in Lewontin (1964) including the maximum and minimum values that D can take. Mathematically, using basic algebra, it can be shown that D can also be written solely in terms of haplotypes:

D=P₁₁P₂₂−P₁₂P₂₁ (17)

If one transforms D by squaring it and subsequently dividing by the product of the allele frequencies of A₁, A₂, B₁ and B₂, the resulting quantity, called r², is equivalent to the square of the Pearson's correlation coefficient commonly used in statistics (e.g. Hoel, 1954).

$${r}^{2} = \frac{{D}^{2}}{{p}_{1} {p}_{2} {q}_{1} {q}_{2}} \qquad ( 18 )$$

[0218] As with D, values of r² close to 0 indicate linkage equilibrium between the two markers examined in the sample set. As values of r² increase, the two markers are said to be in linkage disequilibrium. The range of values that r² can take are from 0 to 1. r²=1 when there is a perfect correlation between the alleles at the two markers.

[0219] In addition, the quantities discussed above are sample-specific. And as such, it is necessary to formulate notation specific to the samples studied. In the approach discussed here, three types of samples are of primary interest: (i) a sample of chromosomes from individuals affected by a disease-related phenotype (cases), (ii) a sample of chromosomes obtained from individuals not affected by the disease-related phenotype (controls), and (iii) a standard sample set used for the construction of haplotypes and calculation pairwise linkage disequilibrium. For the allele frequencies used in the development of the method described below, an additional subscript will be added to denote either the case or control sample sets.

p_{1,cs}=freq(A₁ in cases) (19)

p_{2,cs}=freq(A₂ in cases) (20)

q_{1,cs}=freq(B₁ in cases) (21)

q_{2,cs}=freq(B₂ in cases) (22)

Similarly,

p_{1,ct}=freq(A₁ in controls) (23)

p_{2,ct}=freq(A₂ in controls) (24)

q_{1,ct}=freq(B₁ in controls) (25)

q_{2,ct}=freq(B₂ in controls) (26)

[0220] As a well-accepted sample set is necessary for robust linkage disequilibrium calculations, data obtained from the International HapMap project (The International HapMap Consortium 2003, 2005; Thorisson et al, 2005; McVean et al, 2005) can be used for the calculation of pairwise r² values. Indeed, the samples genotyped for the International HapMap Project were selected to be representative examples from various human sub-populations with sufficient numbers of chromosomes examined to draw meaningful and robust conclusions from the patterns of genetic variation observed. The International HapMap project website (hapmap.org) contains a description of the project, methods utilized and samples examined. It is useful to examine empirical data to get a sense of the patterns present in such data.

[0221] Haplotype frequencies were explicit arguments in equation (18) above. However, knowing the 2-marker haplotype frequencies requires that phase to be determined for doubly heterozygous samples. When phase is unknown in the data examined, various algorithms can be used to infer phase from the genotype data. This issue was discussed earlier where the doubly heterozygous individual with a 2-SNP genotype of A₁A₂B₁B₂ could have one of two different sets of chromosomes: A₁B₁/A₂B₂ or A₁B₂/A₂B₁. One such algorithm to estimate haplotype frequencies is the expectation-maximization (EM) algorithm first formalized by Dempster et al et al. (1977). This algorithm is often used in genetics to infer haplotype frequencies from genotype data (e.g. e.g. Excoffier and Slatkin (1995); Tregouet et al et al., (2004)). It should be noted that for the two-SNP case explored here, EM algorithms have very little error provided that the allele frequencies and sample sizes are not too small. The impact on r² values is typically negligible.

[0222] As correlated genetic markers share information, interrogation of SNP markers in LD with a disease-associated SNP marker can also have sufficient power to detect disease association (Long and Langley (1999)). The relationship between the power to directly find disease-associated alleles and the power to indirectly detect disease-association was investigated by Pritchard and Przeworski (2001). In a straight-forward derivation, it can be shown that the power to detect disease association indirectly at a marker locus in linkage disequilibrium with a disease-association locus is approximately the same as the power to detect disease-association directly at the disease-association locus if the sample size is increased by a factor of

$$\frac{1}{{r}^{2}}$$

(the reciprocal of equation 18) at the marker in comparison with the disease-association locus.

[0223] Therefore, if one calculated the power to detect disease-association indirectly with an experiment having N samples, then equivalent power to directly detect disease-association (at the actual disease-susceptibility locus) would necessitate an experiment using approximately r² N samples. This elementary relationship between power, sample size and linkage disequilibrium can be used to derive an r² threshold value useful in determining whether or not genotyping markers in linkage disequilibrium with a SNP marker directly associated with disease status has enough power to indirectly detect disease-association.

[0224] To commence a derivation of the power to detect disease-associated markers through an indirect process, define the effective chromosomal sample size as

$$n = \frac{4 {N}_{cs} {N}_{ct}}{{N}_{cs} + {N}_{ct}} ; \qquad ( 27 )$$

where N_{cs} and N_{ct} are the numbers of diploid cases and controls, respectively. This is necessary to handle situations where the numbers of cases and controls are not equivalent. For equal case and control sample sizes, N_{cs}=N_{ct}=N, the value of the effective number of chromosomes is simply n=2N—as expected. Let power be calculated for a significance level α (such that traditional P-values below α will be deemed statistically significant). Define the standard Gaussian distribution function as Φ(). Mathematically,

$$Φ ( x ) = \frac{1}{\sqrt{2 π}} {\int }_{- ∞}^{x} {e}^{\frac{{θ}^{2}}{2}} d θ \qquad ( 28 )$$

Alternatively, the following error function notation (Erf) may also be used,

$$Φ ( x ) = \frac{1}{2} [ 1 + Erf ( \frac{x}{\sqrt{2}} ) ] \qquad ( 29 )$$

[0225] For example, Φ(1.644854)=0.95. The value of r² may be derived to yield a pre-specified minimum amount of power to detect disease association though indirect interrogation. Noting that the LD SNP marker could be the one that is carrying the disease-association allele, therefore that this approach constitutes a lower-bound model where all indirect power results are expected to be at least as large as those interrogated.

[0226] Denote by β the error rate for not detecting truly disease-associated markers. Therefore, 1−β is the classical definition of statistical power. Substituting the Pritchard-Pzreworski result into the sample size, the power to detect disease association at a significance level of α is given by the approximation

$$1 - β ≅ Φ [ \frac{\vert {q}_{1 , cs} - {q}_{1 , ct} \vert}{\sqrt{\frac{{q}_{1 , cs} ( 1 - {q}_{1 , cs} ) + {q}_{1 , ct} ( 1 - {q}_{1 , ct} )}{{r}^{2} n}}} - {Z}_{1 - \frac{α}{2}} ] ; \qquad ( 30 )$$

where Zᵤ is the inverse of the standard normal cumulative distribution evaluated at u (u ε(0,1)). Zᵤ=Φ⁻¹(u), where Φ(Φ⁻¹(u))=Φ⁻¹(Φ(u))=u. For example, setting α=0.05, and therefore 1−α/2=0.975, we obtain Z_{0.975}=1.95996. Next, setting power equal to a threshold of a minimum power of T,

$$T = Φ [ \frac{\vert {q}_{1 , cs} - {q}_{1 , ct} \vert}{\sqrt{\frac{{q}_{1 , cs} ( 1 - {q}_{1 , cs} ) + {q}_{1 , ct} ( 1 - {q}_{1 , ct} )}{{r}^{2} n}}} - {Z}_{1 - \frac{α}{2}} ] \qquad ( 31 )$$

and solving for r², the following threshold r² is obtained:

$$\begin{matrix}{r}_{T}^{2} = {\frac{[ {q}_{1 , cs} ( 1 - {q}_{1 , cs} ) + {q}_{1 , ct} ( 1 - {q}_{1 , ct} ) ]}{{n ( {q}_{1 , cs} - {q}_{1 , ct} )}^{2}} [ {Φ}^{- 1} ( T ) + {Z}_{1 - \frac{α}{2}} ]}^{2} \\ or , & ( 32 ) \\ {r}_{T}^{2} = \frac{{( {Z}_{T} + {Z}_{1 - \frac{α}{2}} )}^{2}}{n} [ \frac{{q}_{1 , cs} - {( {q}_{1 , cs} )}^{2} + {q}_{1 , ct} - {( {q}_{1 , ct} )}^{2}}{{( {q}_{1 , cs} - {q}_{1 , ct} )}^{2}} ] & ( 33 )\end{matrix}$$

[0227] Suppose that r² is calculated between an interrogated SNP and a number of other SNPs with varying levels of LD with the interrogated SNP. The threshold value r_{T}² is the minimum value of linkage disequilibrium between the interrogated SNP and the potential LD SNPs such that the LD SNP still retains a power greater or equal to T for detecting disease-association. For example, suppose that SNP rs200 is genotyped in a case-control disease-association study and it is found to be associated with a disease phenotype. Further suppose that the minor allele frequency in 1,000 case chromosomes was found to be 16% in contrast with a minor allele frequency of 10% in 1,000 control chromosomes. Given those measurements one could have predicted, prior to the experiment, that the power to detect disease association at a significance level of 0.05 was quite high—approximately 98% using a test of allelic association. Applying equation (32) one can calculate a minimum value of r² to indirectly assess disease association assuming that the minor allele at SNP rs200 is truly disease-predisposing for a threshold level of power. If one sets the threshold level of power to be 80%, then r_{T}²=0.489 given the same significance level and chromosome numbers as above. Hence, any SNP with a pairwise r² value with rs200 greater than 0.489 is expected to have greater than 80% power to detect the disease association. Further, this is assuming the conservative model where the LD SNP is disease-associated only through linkage disequilibrium with the interrogated SNP rs200.

[0228] The contribution or association of particular SNPs and/or SNP haplotypes with disease phenotypes, such as liver fibrosis, enables the SNPs of the present invention to be used to develop superior diagnostic tests capable of identifying individuals who express a detectable trait, such as liver fibrosis, as the result of a specific genotype, or individuals whose genotype places them at an increased or decreased risk of developing a detectable trait at a subsequent time as compared to individuals who do not have that genotype. As described herein, diagnostics may be based on a single SNP or a group of SNPs. Combined detection of a plurality of SNPs (for example, 2, 3, 4, 5, 6, 7, 8, 9, 10, 11, 12, 13, 14, 15, 16, 17, 18, 19, 20, 24, 25, 30, 32, 48, 50, 64, 96, 100, or any other number in-between, or more, of the SNPs provided in Table 1 and/or Table 2) typically increases the probability of an accurate diagnosis. For example, the presence of a single SNP known to correlate with liver fibrosis might indicate a probability of 20% that an individual has or is at risk of developing liver fibrosis, whereas detection of five SNPs, each of which correlates with liver fibrosis, might indicate a probability of 80% that an individual has or is at risk of developing liver fibrosis. To further increase the accuracy of diagnosis or predisposition screening, analysis of the SNPs of the present invention can be combined with that of other polymorphisms or other risk factors of liver fibrosis, such as disease symptoms, pathological characteristics, family history, diet, environmental factors or lifestyle factors.

[0229] It will, of course, be understood by practitioners skilled in the treatment or diagnosis of liver fibrosis that the present invention generally does not intend to provide an absolute identification of individuals who are at risk (or less at risk) of developing liver fibrosis, and/or pathologies related to liver fibrosis, but rather to indicate a certain increased (or decreased) degree or likelihood of developing the disease based on statistically significant association results. However, this information is extremely valuable as it can be used to, for example, initiate preventive treatments or to allow an individual carrying one or more significant SNPs or SNP haplotypes to foresee warning signs such as minor clinical symptoms, or to have regularly scheduled physical exams to monitor for appearance of a condition in order to identify and begin treatment of the condition at an early stage. Particularly with diseases that are extremely debilitating or fatal if not treated on time, the knowledge of a potential predisposition, even if this predisposition is not absolute, would likely contribute in a very significant manner to treatment efficacy.

[0230] The diagnostic techniques of the present invention may employ a variety of methodologies to determine whether a test subject has a SNP or a SNP pattern associated with an increased or decreased risk of developing a detectable trait or whether the individual suffers from a detectable trait as a result of a particular polymorphism/mutation, including, for example, methods which enable the analysis of individual chromosomes for haplotyping, family studies, single sperm DNA analysis, or somatic hybrids. The trait analyzed using the diagnostics of the invention may be any detectable trait that is commonly observed in pathologies and disorders related to liver fibrosis.

[0231] Another aspect of the present invention relates to a method of determining whether an individual is at risk (or less at risk) of developing one or more traits or whether an individual expresses one or more traits as a consequence of possessing a particular trait-causing or trait-influencing allele. These methods generally involve obtaining a nucleic acid sample from an individual and assaying the nucleic acid sample to determine which nucleotide(s) is/are present at one or more SNP positions, wherein the assayed nucleotide(s) is/are indicative of an increased or decreased risk of developing the trait or indicative that the individual expresses the trait as a result of possessing a particular trait-causing or trait-influencing allele.

[0232] In another embodiment, the SNP detection reagents of the present invention are used to determine whether an individual has one or more SNP allele(s) affecting the level (e.g., the concentration of mRNA or protein in a sample, etc.) or pattern (e.g., the kinetics of expression, rate of decomposition, stability profile, Km, Vmax, etc.) of gene expression (collectively, the “gene response” of a cell or bodily fluid). Such a determination can be accomplished by screening for mRNA or protein expression (e.g., by using nucleic acid arrays, RT-PCR, TaqMan assays, or mass spectrometry), identifying genes having altered expression in an individual, genotyping SNPs disclosed in Table 1 and/or Table 2 that could affect the expression of the genes having altered expression (e.g., SNPs that are in and/or around the gene(s) having altered expression, SNPs in regulatory/control regions, SNPs in and/or around other genes that are involved in pathways that could affect the expression of the gene(s) having altered expression, or all SNPs could be genotyped), and correlating SNP genotypes with altered gene expression. In this manner, specific SNP alleles at particular SNP sites can be identified that affect gene expression.

[0233] Pharmacogenomics and Therapeutics/Drug Development

[0234] The present invention provides methods for assessing the pharmacogenomics of a subject harboring particular SNP alleles or haplotypes to a particular therapeutic agent or pharmaceutical compound, or to a class of such compounds. Pharmacogenomics deals with the roles which clinically significant hereditary variations (e.g., SNPs) play in the response to drugs due to altered drug disposition and/or abnormal action in affected persons. See, e.g., Roses, Nature 405, 857-865 (2000); Gould Rothberg, Nature Biotechnology 19, 209-211 (2001); Eichelbaum, Clin. Exp. Pharmacol. Physiol. 23(10-11):983-985 (1996); and Linder, Clin. Chem. 43(2):254-266 (1997). The clinical outcomes of these variations can result in severe toxicity of therapeutic drugs in certain individuals or therapeutic failure of drugs in certain individuals as a result of individual variation in metabolism. Thus, the SNP genotype of an individual can determine the way a therapeutic compound acts on the body or the way the body metabolizes the compound. For example, SNPs in drug metabolizing enzymes can affect the activity of these enzymes, which in turn can affect both the intensity and duration of drug action, as well as drug metabolism and clearance.

[0235] The discovery of SNPs in drug metabolizing enzymes, drug transporters, proteins for pharmaceutical agents, and other drug targets has explained why some patients do not obtain the expected drug effects, show an exaggerated drug effect, or experience serious toxicity from standard drug dosages. SNPs can be expressed in the phenotype of the extensive metabolizer and in the phenotype of the poor metabolizer. Accordingly, SNPs may lead to allelic variants of a protein in which one or more of the protein functions in one population are different from those in another population. SNPs and the encoded variant peptides thus provide targets to ascertain a genetic predisposition that can affect treatment modality. For example, in a ligand-based treatment, SNPs may give rise to amino terminal extracellular domains and/or other ligand-binding regions of a receptor that are more or less active in ligand binding, thereby affecting subsequent protein activation. Accordingly, ligand dosage would necessarily be modified to maximize the therapeutic effect within a given population containing particular SNP alleles or haplotypes.

[0236] As an alternative to genotyping, specific variant proteins containing variant amino acid sequences encoded by alternative SNP alleles could be identified. Thus, pharmacogenomic characterization of an individual permits the selection of effective compounds and effective dosages of such compounds for prophylactic or therapeutic uses based on the individual's SNP genotype, thereby enhancing and optimizing the effectiveness of the therapy. Furthermore, the production of recombinant cells and transgenic animals containing particular SNPs/haplotypes allow effective clinical design and testing of treatment compounds and dosage regimens. For example, transgenic animals can be produced that differ only in specific SNP alleles in a gene that is orthologous to a human disease susceptibility gene.

[0237] Pharmacogenomic uses of the SNPs of the present invention provide several significant advantages for patient care, particularly in treating liver fibrosis. Pharmacogenomic characterization of an individual, based on an individual's SNP genotype, can identify those individuals unlikely to respond to treatment with a particular medication and thereby allows physicians to avoid prescribing the ineffective medication to those individuals. On the other hand, SNP genotyping of an individual may enable physicians to select the appropriate medication and dosage regimen that will be most effective based on an individual's SNP genotype. This information increases a physician's confidence in prescribing medications and motivates patients to comply with their drug regimens. Furthermore, pharmacogenomics may identify patients predisposed to toxicity and adverse reactions to particular drugs or drug dosages. Adverse drug reactions lead to more than 100,000 avoidable deaths per year in the United States alone and therefore represent a significant cause of hospitalization and death, as well as a significant economic burden on the healthcare system (Pfost et. al., Trends in Biotechnology, August 2000). Thus, pharmacogenomics based on the SNPs disclosed herein has the potential to both save lives and reduce healthcare costs substantially. Current treatments of patients suffering liver fibrosis include interferon (including pegylated-interferon) treatment, and combination treatment with interferon and ribavirin. See Lauer et al for detailed description on HCV treatments. These treatments can have drastic side effects on patients receiving the treatment, and should be used in a targeted manner. In that regard, embodiments of the present invention can be very useful in assisting clinicians select patients who are more likely develop severe form of fibrosis, and thus warrant the application of HCV treatments on such patients. In the mean time, patients who are deemed to have low risk of developing severe form of fibrosis/cirrhosis, using SNP markers discovered herein, can be spared of the aggravation of the HCV treatment due to the reduced benefit of such treatment in view of its cost.

[0238] Pharmacogenomics in general is discussed further in Rose et al., “Pharmacogenetic analysis of clinically relevant genetic polymorphisms”, Methods Mol Med. 2003; 85:225-37. Pharmacogenomics as it relates to Alzheimer's disease and other neurodegenerative disorders is discussed in Cacabelos, “Pharmacogenomics for the treatment of dementia”, Ann Med. 2002; 34(5):357-79, Maimone et al., “Pharmacogenomics of neurodegenerative diseases”, Eur J Pharmacol. 2001 Feb. 9; 413(1):11-29, and Poirier, “Apolipoprotein E: a pharmacogenetic target for the treatment of Alzheimer's disease”, Mol Diagn. 1999 December; 4(4):335-41. Pharmacogenomics as it relates to cardiovascular disorders is discussed in Siest et al., “Pharmacogenomics of drugs affecting the cardiovascular system”, Clin Chem Lab Med. 2003 April; 41(4):590-9, Mukherjee et al., “Pharmacogenomics in cardiovascular diseases”, Prog Cardiovasc Dis. 2002 May-June; 44(6):479-98, and Mooser et al., “Cardiovascular pharmacogenetics in the SNP era”, J Thromb Haemost. 2003 July; 1(7):1398-402. Pharmacogenomics as it relates to cancer is discussed in McLeod et al., “Cancer pharmacogenomics: SNPs, chips, and the individual patient”, Cancer Invest. 2003; 21(4):630-40 and Watters et al., “Cancer pharmacogenomics: current and future applications”, Biochim Biophys Acta. 2003 Mar. 17; 1603(2):99-111.

[0239] The SNPs of the present invention also can be used to identify novel therapeutic targets for liver fibrosis. For example, genes containing the disease-associated variants (“variant genes”) or their products, as well as genes or their products that are directly or indirectly regulated by or interacting with these variant genes or their products, can be targeted for the development of therapeutics that, for example, treat the disease or prevent or delay disease onset. The therapeutics may be composed of, for example, small molecules, proteins, protein fragments or peptides, antibodies, nucleic acids, or their derivatives or mimetics which modulate the functions or levels of the target genes or gene products.

[0240] The SNP-containing nucleic acid molecules disclosed herein, and their complementary nucleic acid molecules, may be used as antisense constructs to control gene expression in cells, tissues, and organisms. Antisense technology is well established in the art and extensively reviewed in Antisense Drug Technology: Principles, Strategies, and Applications, Crooke (ed.), Marcel Dekker, Inc.: New York (2001). An antisense nucleic acid molecule is generally designed to be complementary to a region of mRNA expressed by a gene so that the antisense molecule hybridizes to the mRNA and thereby blocks translation of mRNA into protein. Various classes of antisense oligonucleotides are used in the art, two of which are cleavers and blockers. Cleavers, by binding to target RNAs, activate intracellular nucleases (e.g., RNaseH or RNase L) that cleave the target RNA. Blockers, which also bind to target RNAs, inhibit protein translation through steric hindrance of ribosomes. Exemplary blockers include peptide nucleic acids, morpholinos, locked nucleic acids, and methylphosphonates (see, e.g., Thompson, Drug Discovery Today, 7 (17): 912-917 (2002)). Antisense oligonucleotides are directly useful as therapeutic agents, and are also useful for determining and validating gene function (e.g., in gene knock-out or knock-down experiments).

[0241] Antisense technology is further reviewed in: Lavery et al., “Antisense and RNAi: powerful tools in drug target discovery and validation”, Curr Opin Drug Discov Devel. 2003 July; 6(4):561-9; Stephens et al., “Antisense oligonucleotide therapy in cancer”, Curr Opin Mol Ther. 2003 April; 5(2):118-22; Kurreck, “Antisense technologies. Improvement through novel chemical modifications”, Eur J Biochem. 2003 April; 270(8):1628-44; Dias et al., “Antisense oligonucleotides: basic concepts and mechanisms”, Mol Cancer Ther. 2002 March; 1(5):347-55; Chen, “Clinical development of antisense oligonucleotides as anti-cancer therapeutics”, Methods Mol Med. 2003; 75:621-36; Wang et al., “Antisense anticancer oligonucleotide therapeutics”, Curr Cancer Drug Targets. 2001 November; 1(3):177-96; and Bennett, “Efficiency of antisense oligonucleotide drug discovery”, Antisense Nucleic Acid Drug Dev. 2002 June; 12(3):215-24.

[0242] The SNPs of the present invention are particularly useful for designing antisense reagents that are specific for particular nucleic acid variants. Based on the SNP information disclosed herein, antisense oligonucleotides can be produced that specifically target mRNA molecules that contain one or more particular SNP nucleotides. In this manner, expression of mRNA molecules that contain one or more undesired polymorphisms (e.g., SNP nucleotides that lead to a defective protein such as an amino acid substitution in a catalytic domain) can be inhibited or completely blocked. Thus, antisense oligonucleotides can be used to specifically bind a particular polymorphic form (e.g., a SNP allele that encodes a defective protein), thereby inhibiting translation of this form, but which do not bind an alternative polymorphic form (e.g., an alternative SNP nucleotide that encodes a protein having normal function).

[0243] Antisense molecules can be used to inactivate mRNA in order to inhibit gene expression and production of defective proteins. Accordingly, these molecules can be used to treat a disorder, such as liver fibrosis, characterized by abnormal or undesired gene expression or expression of certain defective proteins. This technique can involve cleavage by means of ribozymes containing nucleotide sequences complementary to one or more regions in the mRNA that attenuate the ability of the mRNA to be translated. Possible mRNA regions include, for example, protein-coding regions and particularly protein-coding regions corresponding to catalytic activities, substrate/ligand binding, or other functional activities of a protein.

[0244] The SNPs of the present invention are also useful for designing RNA interference reagents that specifically target nucleic acid molecules having particular SNP variants. RNA interference (RNAi), also referred to as gene silencing, is based on using double-stranded RNA (dsRNA) molecules to turn genes off. When introduced into a cell, dsRNAs are processed by the cell into short fragments (generally about 21, 22, or 23 nucleotides in length) known as small interfering RNAs (siRNAs) which the cell uses in a sequence-specific manner to recognize and destroy complementary RNAs (Thompson, Drug Discovery Today, 7 (17): 912-917 (2002)). Accordingly, an aspect of the present invention specifically contemplates isolated nucleic acid molecules that are about 18-26 nucleotides in length, preferably 19-25 nucleotides in length, and more preferably 20, 21, 22, or 23 nucleotides in length, and the use of these nucleic acid molecules for RNAi. Because RNAi molecules, including siRNAs, act in a sequence-specific manner, the SNPs of the present invention can be used to design RNAi reagents that recognize and destroy nucleic acid molecules having specific SNP alleles/nucleotides (such as deleterious alleles that lead to the production of defective proteins), while not affecting nucleic acid molecules having alternative SNP alleles (such as alleles that encode proteins having normal function). As with antisense reagents, RNAi reagents may be directly useful as therapeutic agents (e.g., for turning off defective, disease-causing genes), and are also useful for characterizing and validating gene function (e.g., in gene knock-out or knock-down experiments).

[0245] The following references provide a further review of RNAi: Reynolds et al., “Rational siRNA design for RNA interference”, Nat Biotechnol. 2004 March; 22(3):326-30. Epub 2004 Feb. 1; Chi et al., “Genomewide view of gene silencing by small interfering RNAs”, PNAS 100(11):6343-6346, 2003; Vickers et al., “Efficient Reduction of Target RNAs by Small Interfering RNA and RNase H-dependent Antisense Agents”, J. Biol. Chem. 278: 7108-7118, 2003; Agami, “RNAi and related mechanisms and their potential use for therapy”, Curr Opin Chem Biol. 2002 December; 6(6):829-34; Lavery et al., “Antisense and RNAi: powerful tools in drug target discovery and validation”, Curr Opin Drug Discov Devel. 2003 July; 6(4):561-9; Shi, “Mammalian RNAi for the masses”, Trends Genet 2003 January; 19(1):9-12), Shuey et al., “RNAi: gene-silencing in therapeutic intervention”, Drug Discovery Today 2002 October; 7(20):1040-1046; McManus et al., Nat Rev Genet 2002 October; 3(10):737-47; Xia et al., Nat Biotechnol 2002 October; 20(10):1006-10; Plasterk et al., Curr Opin Genet Dev 2000 October; 10(5):562-7; Bosher et al., Nat Cell Biol 2000 February; 2(2):E31-6; and Hunter, Curr Biol 1999 Jun. 17; 9(12):R440-2).

[0246] A subject suffering from a pathological condition, such as liver fibrosis, ascribed to a SNP may be treated so as to correct the genetic defect (see Kren et al., Proc. Natl. Acad. Sci. USA 96:10349-10354 (1999)). Such a subject can be identified by any method that can detect the polymorphism in a biological sample drawn from the subject. Such a genetic defect may be permanently corrected by administering to such a subject a nucleic acid fragment incorporating a repair sequence that supplies the normal/wild-type nucleotide at the position of the SNP. This site-specific repair sequence can encompass an RNA/DNA oligonucleotide that operates to promote endogenous repair of a subject's genomic DNA. The site-specific repair sequence is administered in an appropriate vehicle, such as a complex with polyethylenimine, encapsulated in anionic liposomes, a viral vector such as an adenovirus, or other pharmaceutical composition that promotes intracellular uptake of the administered nucleic acid. A genetic defect leading to an inborn pathology may then be overcome, as the chimeric oligonucleotides induce incorporation of the normal sequence into the subject's genome. Upon incorporation, the normal gene product is expressed, and the replacement is propagated, thereby engendering a permanent repair and therapeutic enhancement of the clinical condition of the subject.

[0247] In cases in which a cSNP results in a variant protein that is ascribed to be the cause of, or a contributing factor to, a pathological condition, a method of treating such a condition can include administering to a subject experiencing the pathology the wild-type/normal cognate of the variant protein. Once administered in an effective dosing regimen, the wild-type cognate provides complementation or remediation of the pathological condition.

[0248] The invention further provides a method for identifying a compound or agent that can be used to treat liver fibrosis. The SNPs disclosed herein are useful as targets for the identification and/or development of therapeutic agents. A method for identifying a therapeutic agent or compound typically includes assaying the ability of the agent or compound to modulate the activity and/or expression of a SNP-containing nucleic acid or the encoded product and thus identifying an agent or a compound that can be used to treat a disorder characterized by undesired activity or expression of the SNP-containing nucleic acid or the encoded product. The assays can be performed in cell-based and cell-free systems. Cell-based assays can include cells naturally expressing the nucleic acid molecules of interest or recombinant cells genetically engineered to express certain nucleic acid molecules.

[0249] Variant gene expression in a liver fibrosis patient can include, for example, either expression of a SNP-containing nucleic acid sequence (for instance, a gene that contains a SNP can be transcribed into an mRNA transcript molecule containing the SNP, which can in turn be translated into a variant protein) or altered expression of a normal/wild-type nucleic acid sequence due to one or more SNPs (for instance, a regulatory/control region can contain a SNP that affects the level or pattern of expression of a normal transcript).

[0250] Assays for variant gene expression can involve direct assays of nucleic acid levels (e.g., mRNA levels), expressed protein levels, or of collateral compounds involved in a signal pathway. Further, the expression of genes that are up- or down-regulated in response to the signal pathway can also be assayed. In this embodiment, the regulatory regions of these genes can be operably linked to a reporter gene such as luciferase.

[0251] Modulators of variant gene expression can be identified in a method wherein, for example, a cell is contacted with a candidate compound/agent and the expression of mRNA determined. The level of expression of mRNA in the presence of the candidate compound is compared to the level of expression of mRNA in the absence of the candidate compound. The candidate compound can then be identified as a modulator of variant gene expression based on this comparison and be used to treat a disorder such as liver fibrosis that is characterized by variant gene expression (e.g., either expression of a SNP-containing nucleic acid or altered expression of a normal/wild-type nucleic acid molecule due to one or more SNPs that affect expression of the nucleic acid molecule) due to one or more SNPs of the present invention. When expression of mRNA is statistically significantly greater in the presence of the candidate compound than in its absence, the candidate compound is identified as a stimulator of nucleic acid expression. When nucleic acid expression is statistically significantly less in the presence of the candidate compound than in its absence, the candidate compound is identified as an inhibitor of nucleic acid expression.

[0252] The invention further provides methods of treatment, with the SNP or associated nucleic acid domain (e.g., catalytic domain, ligand/substrate-binding domain, regulatory/control region, etc.) or gene, or the encoded mRNA transcript, as a target, using a compound identified through drug screening as a gene modulator to modulate variant nucleic acid expression. Modulation can include either up-regulation (i.e., activation or agonization) or down-regulation (i.e., suppression or antagonization) of nucleic acid expression.

[0253] Expression of mRNA transcripts and encoded proteins, either wild type or variant, may be altered in individuals with a particular SNP allele in a regulatory/control element, such as a promoter or transcription factor binding domain, that regulates expression. In this situation, methods of treatment and compounds can be identified, as discussed herein, that regulate or overcome the variant regulatory/control element, thereby generating normal, or healthy, expression levels of either the wild type or variant protein.

[0254] The SNP-containing nucleic acid molecules of the present invention are also useful for monitoring the effectiveness of modulating compounds on the expression or activity of a variant gene, or encoded product, in clinical trials or in a treatment regimen. Thus, the gene expression pattern can serve as an indicator for the continuing effectiveness of treatment with the compound, particularly with compounds to which a patient can develop resistance, as well as an indicator for toxicities. The gene expression pattern can also serve as a marker indicative of a physiological response of the affected cells to the compound. Accordingly, such monitoring would allow either increased administration of the compound or the administration of alternative compounds to which the patient has not become resistant. Similarly, if the level of nucleic acid expression falls below a desirable level, administration of the compound could be commensurately decreased.

[0255] In another aspect of the present invention, there is provided a pharmaceutical pack comprising a therapeutic agent (e.g., a small molecule drug, antibody, peptide, antisense or RNAi nucleic acid molecule, etc.) and a set of instructions for administration of the therapeutic agent to humans diagnostically tested for one or more SNPs or SNP haplotypes provided by the present invention.

[0256] The SNPs/haplotypes of the present invention are also useful for improving many different aspects of the drug development process. For instance, an aspect of the present invention includes selecting individuals for clinical trials based on their SNP genotype. For example, individuals with SNP genotypes that indicate that they are likely to positively respond to a drug can be included in the trials, whereas those individuals whose SNP genotypes indicate that they are less likely to or would not respond to the drug, or who are at risk for suffering toxic effects or other adverse reactions, can be excluded from the clinical trials. This not only can improve the safety of clinical trials, but also can enhance the chances that the trial will demonstrate statistically significant efficacy. Furthermore, the SNPs of the present invention may explain why certain previously developed drugs performed poorly in clinical trials and may help identify a subset of the population that would benefit from a drug that had previously performed poorly in clinical trials, thereby “rescuing” previously developed drugs, and enabling the drug to be made available to a particular liver fibrosis patient population that can benefit from it.

[0257] SNPs have many important uses in drug discovery, screening, and development. A high probability exists that, for any gene/protein selected as a potential drug target, variants of that gene/protein will exist in a patient population. Thus, determining the impact of gene/protein variants on the selection and delivery of a therapeutic agent should be an integral aspect of the drug discovery and development process. (Jazwinska, A Trends Guide to Genetic Variation and Genomic Medicine, 2002 March; S30-S36).

[0258] Knowledge of variants (e.g., SNPs and any corresponding amino acid polymorphisms) of a particular therapeutic target (e.g., a gene, mRNA transcript, or protein) enables parallel screening of the variants in order to identify therapeutic candidates (e.g., small molecule compounds, antibodies, antisense or RNAi nucleic acid compounds, etc.) that demonstrate efficacy across variants (Rothberg, Nat Biotechnol 2001 March; 19(3):209-11). Such therapeutic candidates would be expected to show equal efficacy across a larger segment of the patient population, thereby leading to a larger potential market for the therapeutic candidate.

[0259] Furthermore, identifying variants of a potential therapeutic target enables the most common form of the target to be used for selection of therapeutic candidates, thereby helping to ensure that the experimental activity that is observed for the selected candidates reflects the real activity expected in the largest proportion of a patient population (Jazwinska, A Trends Guide to Genetic Variation and Genomic Medicine, 2002 March; S30-S36).

[0260] Additionally, screening therapeutic candidates against all known variants of a target can enable the early identification of potential toxicities and adverse reactions relating to particular variants. For example, variability in drug absorption, distribution, metabolism and excretion (ADME) caused by, for example, SNPs in therapeutic targets or drug metabolizing genes, can be identified, and this information can be utilized during the drug development process to minimize variability in drug disposition and develop therapeutic agents that are safer across a wider range of a patient population. The SNPs of the present invention, including the variant proteins and encoding polymorphic nucleic acid molecules provided in Tables 1-2, are useful in conjunction with a variety of toxicology methods established in the art, such as those set forth in Current Protocols in Toxicology, John Wiley & Sons, Inc., N.Y.

[0261] Furthermore, therapeutic agents that target any art-known proteins (or nucleic acid molecules, either RNA or DNA) may cross-react with the variant proteins (or polymorphic nucleic acid molecules) disclosed in Table 1, thereby significantly affecting the pharmacokinetic properties of the drug. Consequently, the protein variants and the SNP-containing nucleic acid molecules disclosed in Tables 1-2 are useful in developing, screening, and evaluating therapeutic agents that target corresponding art-known protein forms (or nucleic acid molecules). Additionally, as discussed above, knowledge of all polymorphic forms of a particular drug target enables the design of therapeutic agents that are effective against most or all such polymorphic forms of the drug target.

[0262] Pharmaceutical Compositions and Administration Thereof

[0263] Any of the liver fibrosis-associated proteins, and encoding nucleic acid molecules, disclosed herein can be used as therapeutic targets (or directly used themselves as therapeutic compounds) for treating liver fibrosis and related pathologies, and the present disclosure enables therapeutic compounds (e.g., small molecules, antibodies, therapeutic proteins, RNAi and antisense molecules, etc.) to be developed that target (or are comprised of) any of these therapeutic targets.

[0264] In general, a therapeutic compound will be administered in a therapeutically effective amount by any of the accepted modes of administration for agents that serve similar utilities. The actual amount of the therapeutic compound of this invention, i.e., the active ingredient, will depend upon numerous factors such as the severity of the disease to be treated, the age and relative health of the subject, the potency of the compound used, the route and form of administration, and other factors.

[0265] Therapeutically effective amounts of therapeutic compounds may range from, for example, approximately 0.01-50 mg per kilogram body weight of the recipient per day; preferably about 0.1-20 mg/kg/day. Thus, as an example, for administration to a 70 kg person, the dosage range would most preferably be about 7 mg to 1.4 g per day.

[0266] In general, therapeutic compounds will be administered as pharmaceutical compositions by any one of the following routes: oral, systemic (e.g., transdermal, intranasal, or by suppository), or parenteral (e.g., intramuscular, intravenous, or subcutaneous) administration. The preferred manner of administration is oral or parenteral using a convenient daily dosage regimen, which can be adjusted according to the degree of affliction. Oral compositions can take the form of tablets, pills, capsules, semisolids, powders, sustained release formulations, solutions, suspensions, elixirs, aerosols, or any other appropriate compositions.

[0267] The choice of formulation depends on various factors such as the mode of drug administration (e.g., for oral administration, formulations in the form of tablets, pills, or capsules are preferred) and the bioavailability of the drug substance. Recently, pharmaceutical formulations have been developed especially for drugs that show poor bioavailability based upon the principle that bioavailability can be increased by increasing the surface area, i.e., decreasing particle size. For example, U.S. Pat. No. 4,107,288 describes a pharmaceutical formulation having particles in the size range from 10 to 1,000 nm in which the active material is supported on a cross-linked matrix of macromolecules. U.S. Pat. No. 5,145,684 describes the production of a pharmaceutical formulation in which the drug substance is pulverized to nanoparticles (average particle size of 400 nm) in the presence of a surface modifier and then dispersed in a liquid medium to give a pharmaceutical formulation that exhibits remarkably high bioavailability.

[0268] Pharmaceutical compositions are comprised of, in general, a therapeutic compound in combination with at least one pharmaceutically acceptable excipient. Acceptable excipients are non-toxic, aid administration, and do not adversely affect the therapeutic benefit of the therapeutic compound. Such excipients may be any solid, liquid, semi-solid or, in the case of an aerosol composition, gaseous excipient that is generally available to one skilled in the art.

[0269] Solid pharmaceutical excipients include starch, cellulose, talc, glucose, lactose, sucrose, gelatin, malt, rice, flour, chalk, silica gel, magnesium stearate, sodium stearate, glycerol monostearate, sodium chloride, dried skim milk and the like. Liquid and semisolid excipients may be selected from glycerol, propylene glycol, water, ethanol and various oils, including those of petroleum, animal, vegetable or synthetic origin, e.g., peanut oil, soybean oil, mineral oil, sesame oil, etc. Preferred liquid carriers, particularly for injectable solutions, include water, saline, aqueous dextrose, and glycols.

[0270] Compressed gases may be used to disperse a compound of this invention in aerosol form. Inert gases suitable for this purpose are nitrogen, carbon dioxide, etc.

[0271] Other suitable pharmaceutical excipients and their formulations are described in Remington's Pharmaceutical Sciences, edited by E. W. Martin (Mack Publishing Company, 18^{th} ed., 1990).

[0272] The amount of the therapeutic compound in a formulation can vary within the full range employed by those skilled in the art. Typically, the formulation will contain, on a weight percent (wt %) basis, from about 0.01-99.99 wt % of the therapeutic compound based on the total formulation, with the balance being one or more suitable pharmaceutical excipients. Preferably, the compound is present at a level of about 1-80 wt %.

[0273] Therapeutic compounds can be administered alone or in combination with other therapeutic compounds or in combination with one or more other active ingredient(s). For example, an inhibitor or stimulator of a liver fibrosis-associated protein can be administered in combination with another agent that inhibits or stimulates the activity of the same or a different liver fibrosis-associated protein to thereby counteract the affects of liver fibrosis.

[0274] For further information regarding pharmacology, see Current Protocols in Pharmacology, John Wiley & Sons, Inc., N.Y.

[0275] Human Identification Applications

[0276] In addition to their diagnostic and therapeutic uses in liver fibrosis and related pathologies, the SNPs provided by the present invention are also useful as human identification markers for such applications as forensics, paternity testing, and biometrics (see, e.g., Gill, “An assessment of the utility of single nucleotide polymorphisms (SNPs) for forensic purposes”, Int J Legal Med. 2001; 114(4-5):204-10). Genetic variations in the nucleic acid sequences between individuals can be used as genetic markers to identify individuals and to associate a biological sample with an individual. Determination of which nucleotides occupy a set of SNP positions in an individual identifies a set of SNP markers that distinguishes the individual. The more SNP positions that are analyzed, the lower the probability that the set of SNPs in one individual is the same as that in an unrelated individual. Preferably, if multiple sites are analyzed, the sites are unlinked (i.e., inherited independently). Thus, preferred sets of SNPs can be selected from among the SNPs disclosed herein, which may include SNPs on different chromosomes, SNPs on different chromosome arms, and/or SNPs that are dispersed over substantial distances along the same chromosome arm.

[0277] Furthermore, among the SNPs disclosed herein, preferred SNPs for use in certain forensic/human identification applications include SNPs located at degenerate codon positions (i.e., the third position in certain codons which can be one of two or more alternative nucleotides and still encode the same amino acid), since these SNPs do not affect the encoded protein. SNPs that do not affect the encoded protein are expected to be under less selective pressure and are therefore expected to be more polymorphic in a population, which is typically an advantage for forensic/human identification applications. However, for certain forensics/human identification applications, such as predicting phenotypic characteristics (e.g., inferring ancestry or inferring one or more physical characteristics of an individual) from a DNA sample, it may be desirable to utilize SNPs that affect the encoded protein.

[0278] For many of the SNPs disclosed in Tables 1-2 (which are identified as “Applera” SNP source), Tables 1-2 provide SNP allele frequencies obtained by re-sequencing the DNA of chromosomes from 39 individuals (Tables 1-2 also provide allele frequency information for “Celera” source SNPs and, where available, public SNPs from dbEST, HGBASE, and/or HGMD). The allele frequencies provided in Tables 1-2 enable these SNPs to be readily used for human identification applications. Although any SNP disclosed in Table 1 and/or Table 2 could be used for human identification, the closer that the frequency of the minor allele at a particular SNP site is to 50%, the greater the ability of that SNP to discriminate between different individuals in a population since it becomes increasingly likely that two randomly selected individuals would have different alleles at that SNP site. Using the SNP allele frequencies provided in Tables 1-2, one of ordinary skill in the art could readily select a subset of SNPs for which the frequency of the minor allele is, for example, at least 1%, 2%, 5%, 10%, 20%, 25%, 30%, 40%, 45%, or 50%, or any other frequency in-between. Thus, since Tables 1-2 provide allele frequencies based on the re-sequencing of the chromosomes from 39 individuals, a subset of SNPs could readily be selected for human identification in which the total allele count of the minor allele at a particular SNP site is, for example, at least 1, 2, 4, 8, 10, 16, 20, 24, 30, 32, 36, 38, 39, 40, or any other number in-between.

[0279] Furthermore, Tables 1-2 also provide population group (interchangeably referred to herein as ethnic or racial groups) information coupled with the extensive allele frequency information. For example, the group of 39 individuals whose DNA was re-sequenced was made-up of 20 Caucasians and 19 African-Americans. This population group information enables further refinement of SNP selection for human identification. For example, preferred SNPs for human identification can be selected from Tables 1-2 that have similar allele frequencies in both the Caucasian and African-American populations; thus, for example, SNPs can be selected that have equally high discriminatory power in both populations. Alternatively, SNPs can be selected for which there is a statistically significant difference in allele frequencies between the Caucasian and African-American populations (as an extreme example, a particular allele may be observed only in either the Caucasian or the African-American population group but not observed in the other population group); such SNPs are useful, for example, for predicting the race/ethnicity of an unknown perpetrator from a biological sample such as a hair or blood stain recovered at a crime scene. For a discussion of using SNPs to predict ancestry from a DNA sample, including statistical methods, see Frudakis et al., “A Classifier for the SNP-Based Inference of Ancestry”, Journal of Forensic Sciences 2003; 48(4):771-782.

[0280] SNPs have numerous advantages over other types of polymorphic markers, such as short tandem repeats (STRs). For example, SNPs can be easily scored and are amenable to automation, making SNPs the markers of choice for large-scale forensic databases. SNPs are found in much greater abundance throughout the genome than repeat polymorphisms. Population frequencies of two polymorphic forms can usually be determined with greater accuracy than those of multiple polymorphic forms at multi-allelic loci. SNPs are mutationaly more stable than repeat polymorphisms. SNPs are not susceptible to artefacts such as stutter bands that can hinder analysis. Stutter bands are frequently encountered when analyzing repeat polymorphisms, and are particularly troublesome when analyzing samples such as crime scene samples that may contain mixtures of DNA from multiple sources. Another significant advantage of SNP markers over STR markers is the much shorter length of nucleic acid needed to score a SNP. For example, STR markers are generally several hundred base pairs in length. A SNP, on the other hand, comprises a single nucleotide, and generally a short conserved region on either side of the SNP position for primer and/or probe binding. This makes SNPs more amenable to typing in highly degraded or aged biological samples that are frequently encountered in forensic casework in which DNA may be fragmented into short pieces.

[0281] SNPs also are not subject to microvariant and “off-ladder” alleles frequently encountered when analyzing STR loci. Microvariants are deletions or insertions within a repeat unit that change the size of the amplified DNA product so that the amplified product does not migrate at the same rate as reference alleles with normal sized repeat units. When separated by size, such as by electrophoresis on a polyacrylamide gel, microvariants do not align with a reference allelic ladder of standard sized repeat units, but rather migrate between the reference alleles. The reference allelic ladder is used for precise sizing of alleles for allele classification; therefore alleles that do not align with the reference allelic ladder lead to substantial analysis problems. Furthermore, when analyzing multi-allelic repeat polymorphisms, occasionally an allele is found that consists of more or less repeat units than has been previously seen in the population, or more or less repeat alleles than are included in a reference allelic ladder. These alleles will migrate outside the size range of known alleles in a reference allelic ladder, and therefore are referred to as “off-ladder” alleles. In extreme cases, the allele may contain so few or so many repeats that it migrates well out of the range of the reference allelic ladder. In this situation, the allele may not even be observed, or, with multiplex analysis, it may migrate within or close to the size range for another locus, further confounding analysis.

[0282] SNP analysis avoids the problems of microvariants and off-ladder alleles encountered in STR analysis. Importantly, microvariants and off-ladder alleles may provide significant problems, and may be completely missed, when using analysis methods such as oligonucleotide hybridization arrays, which utilize oligonucleotide probes specific for certain known alleles. Furthermore, off-ladder alleles and microvariants encountered with STR analysis, even when correctly typed, may lead to improper statistical analysis, since their frequencies in the population are generally unknown or poorly characterized, and therefore the statistical significance of a matching genotype may be questionable. All these advantages of SNP analysis are considerable in light of the consequences of most DNA identification cases, which may lead to life imprisonment for an individual, or re-association of remains to the family of a deceased individual.

[0283] DNA can be isolated from biological samples such as blood, bone, hair, saliva, or semen, and compared with the DNA from a reference source at particular SNP positions. Multiple SNP markers can be assayed simultaneously in order to increase the power of discrimination and the statistical significance of a matching genotype. For example, oligonucleotide arrays can be used to genotype a large number of SNPs simultaneously. The SNPs provided by the present invention can be assayed in combination with other polymorphic genetic markers, such as other SNPs known in the art or STRs, in order to identify an individual or to associate an individual with a particular biological sample.

[0284] Furthermore, the SNPs provided by the present invention can be genotyped for inclusion in a database of DNA genotypes, for example, a criminal DNA databank such as the FBI's Combined DNA Index System (CODIS) database. A genotype obtained from a biological sample of unknown source can then be queried against the database to find a matching genotype, with the SNPs of the present invention providing nucleotide positions at which to compare the known and unknown DNA sequences for identity. Accordingly, the present invention provides a database comprising novel SNPs or SNP alleles of the present invention (e.g., the database can comprise information indicating which alleles are possessed by individual members of a population at one or more novel SNP sites of the present invention), such as for use in forensics, biometrics, or other human identification applications. Such a database typically comprises a computer-based system in which the SNPs or SNP alleles of the present invention are recorded on a computer readable medium (see the section of the present specification entitled “Computer-Related Embodiments”).

[0285] The SNPs of the present invention can also be assayed for use in paternity testing. The object of paternity testing is usually to determine whether a male is the father of a child. In most cases, the mother of the child is known and thus, the mother's contribution to the child's genotype can be traced. Paternity testing investigates whether the part of the child's genotype not attributable to the mother is consistent with that of the putative father. Paternity testing can be performed by analyzing sets of polymorphisms in the putative father and the child, with the SNPs of the present invention providing nucleotide positions at which to compare the putative father's and child's DNA sequences for identity. If the set of polymorphisms in the child attributable to the father does not match the set of polymorphisms of the putative father, it can be concluded, barring experimental error, that the putative father is not the father of the child. If the set of polymorphisms in the child attributable to the father match the set of polymorphisms of the putative father, a statistical calculation can be performed to determine the probability of coincidental match, and a conclusion drawn as to the likelihood that the putative father is the true biological father of the child.

[0286] In addition to paternity testing, SNPs are also useful for other types of kinship testing, such as for verifying familial relationships for immigration purposes, or for cases in which an individual alleges to be related to a deceased individual in order to claim an inheritance from the deceased individual, etc. For further information regarding the utility of SNPs for paternity testing and other types of kinship testing, including methods for statistical analysis, see Krawczak, “Informativity assessment for biallelic single nucleotide polymorphisms”, Electrophoresis 1999 June; 20(8):1676-81.

[0287] The use of the SNPs of the present invention for human identification further extends to various authentication systems, commonly referred to as biometric systems, which typically convert physical characteristics of humans (or other organisms) into digital data. Biometric systems include various technological devices that measure such unique anatomical or physiological characteristics as finger, thumb, or palm prints; hand geometry; vein patterning on the back of the hand; blood vessel patterning of the retina and color and texture of the iris; facial characteristics; voice patterns; signature and typing dynamics; and DNA. Such physiological measurements can be used to verify identity and, for example, restrict or allow access based on the identification. Examples of applications for biometrics include physical area security, computer and network security, aircraft passenger check-in and boarding, financial transactions, medical records access, government benefit distribution, voting, law enforcement, passports, visas and immigration, prisons, various military applications, and for restricting access to expensive or dangerous items, such as automobiles or guns (see, for example, O'Connor, Stanford Technology Law Review and U.S. Pat. No. 6,119,096).

[0288] Groups of SNPs, particularly the SNPs provided by the present invention, can be typed to uniquely identify an individual for biometric applications such as those described above. Such SNP typing can readily be accomplished using, for example, DNA chips/arrays. Preferably, a minimally invasive means for obtaining a DNA sample is utilized. For example, PCR amplification enables sufficient quantities of DNA for analysis to be obtained from buccal swabs or fingerprints, which contain DNA-containing skin cells and oils that are naturally transferred during contact. Further information regarding techniques for using SNPs in forensic/human identification applications can be found in, for example, Current Protocols in Human Genetics, John Wiley & Sons, N.Y. (2002), 14.1-14.7.

[0289] Variant Proteins, Antibodies, Vectors & Host Cells, & Uses Thereof

[0290] Variant Proteins Encoded by SNP-Containing Nucleic Acid Molecules

[0291] The present invention provides SNP-containing nucleic acid molecules, many of which encode proteins having variant amino acid sequences as compared to the art-known (i.e., wild-type) proteins. Amino acid sequences encoded by the polymorphic nucleic acid molecules of the present invention are provided as SEQ ID NOS: 16-30 in Table 1 and the Sequence Listing. These variants will generally be referred to herein as variant proteins/peptides/polypeptides, or polymorphic proteins/peptides/polypeptides of the present invention. The terms “protein”, “peptide”, and “polypeptide” are used herein interchangeably.

[0292] A variant protein of the present invention may be encoded by, for example, a nonsynonymous nucleotide substitution at any one of the cSNP positions disclosed herein. In addition, variant proteins may also include proteins whose expression, structure, and/or function is altered by a SNP disclosed herein, such as a SNP that creates or destroys a stop codon, a SNP that affects splicing, and a SNP in control/regulatory elements, e.g. promoters, enhancers, or transcription factor binding domains.

[0293] As used herein, a protein or peptide is said to be “isolated” or “purified” when it is substantially free of cellular material or chemical precursors or other chemicals. The variant proteins of the present invention can be purified to homogeneity or other lower degrees of purity. The level of purification will be based on the intended use. The key feature is that the preparation allows for the desired function of the variant protein, even if in the presence of considerable amounts of other components.

[0294] As used herein, “substantially free of cellular material” includes preparations of the variant protein having less than about 30% (by dry weight) other proteins (i.e., contaminating protein), less than about 20% other proteins, less than about 10% other proteins, or less than about 5% other proteins. When the variant protein is recombinantly produced, it can also be substantially free of culture medium, i.e., culture medium represents less than about 20% of the volume of the protein preparation.

[0295] The language “substantially free of chemical precursors or other chemicals” includes preparations of the variant protein in which it is separated from chemical precursors or other chemicals that are involved in its synthesis. In one embodiment, the language “substantially free of chemical precursors or other chemicals” includes preparations of the variant protein having less than about 30% (by dry weight) chemical precursors or other chemicals, less than about 20% chemical precursors or other chemicals, less than about 10% chemical precursors or other chemicals, or less than about 5% chemical precursors or other chemicals.

[0296] An isolated variant protein may be purified from cells that naturally express it, purified from cells that have been altered to express it (recombinant host cells), or synthesized using known protein synthesis methods. For example, a nucleic acid molecule containing SNP(s) encoding the variant protein can be cloned into an expression vector, the expression vector introduced into a host cell, and the variant protein expressed in the host cell. The variant protein can then be isolated from the cells by any appropriate purification scheme using standard protein purification techniques. Examples of these techniques are described in detail below (Sambrook and Russell, 2000, Molecular Cloning: A Laboratory Manual, Cold Spring Harbor Laboratory Press, Cold Spring Harbor, N.Y.).

[0297] The present invention provides isolated variant proteins that comprise, consist of or consist essentially of amino acid sequences that contain one or more variant amino acids encoded by one or more codons which contain a SNP of the present invention.

[0298] Accordingly, the present invention provides variant proteins that consist of amino acid sequences that contain one or more amino acid polymorphisms (or truncations or extensions due to creation or destruction of a stop codon, respectively) encoded by the SNPs provided in Table 1 and/or Table 2. A protein consists of an amino acid sequence when the amino acid sequence is the entire amino acid sequence of the protein.

[0299] The present invention further provides variant proteins that consist essentially of amino acid sequences that contain one or more amino acid polymorphisms (or truncations or extensions due to creation or destruction of a stop codon, respectively) encoded by the SNPs provided in Table 1 and/or Table 2. A protein consists essentially of an amino acid sequence when such an amino acid sequence is present with only a few additional amino acid residues in the final protein.

[0300] The present invention further provides variant proteins that comprise amino acid sequences that contain one or more amino acid polymorphisms (or truncations or extensions due to creation or destruction of a stop codon, respectively) encoded by the SNPs provided in Table 1 and/or Table 2. A protein comprises an amino acid sequence when the amino acid sequence is at least part of the final amino acid sequence of the protein. In such a fashion, the protein may contain only the variant amino acid sequence or have additional amino acid residues, such as a contiguous encoded sequence that is naturally associated with it or heterologous amino acid residues. Such a protein can have a few additional amino acid residues or can comprise many more additional amino acids. A brief description of how various types of these proteins can be made and isolated is provided below.

[0301] The variant proteins of the present invention can be attached to heterologous sequences to form chimeric or fusion proteins. Such chimeric and fusion proteins comprise a variant protein operatively linked to a heterologous protein having an amino acid sequence not substantially homologous to the variant protein. “Operatively linked” indicates that the coding sequences for the variant protein and the heterologous protein are ligated in-frame. The heterologous protein can be fused to the N-terminus or C-terminus of the variant protein. In another embodiment, the fusion protein is encoded by a fusion polynucleotide that is synthesized by conventional techniques including automated DNA synthesizers. Alternatively, PCR amplification of gene fragments can be carried out using anchor primers which give rise to complementary overhangs between two consecutive gene fragments which can subsequently be annealed and re-amplified to generate a chimeric gene sequence (see Ausubel et al., Current Protocols in Molecular Biology, 1992). Moreover, many expression vectors are commercially available that already encode a fusion moiety (e.g., a GST protein). A variant protein-encoding nucleic acid can be cloned into such an expression vector such that the fusion moiety is linked in-frame to the variant protein.

[0302] In many uses, the fusion protein does not affect the activity of the variant protein. The fusion protein can include, but is not limited to, enzymatic fusion proteins, for example, beta-galactosidase fusions, yeast two-hybrid GAL fusions, poly-His fusions, MYC-tagged, HI-tagged and Ig fusions. Such fusion proteins, particularly poly-His fusions, can facilitate their purification following recombinant expression. In certain host cells (e.g., mammalian host cells), expression and/or secretion of a protein can be increased by using a heterologous signal sequence. Fusion proteins are further described in, for example, Terpe, “Overview of tag protein fusions: from molecular and biochemical fundamentals to commercial systems”, Appl Microbiol Biotechnol. 2003 January; 60(5):523-33. Epub 2002 Nov. 7; Graddis et al., “Designing proteins that work using recombinant technologies”, Curr Pharm Biotechnol. 2002 December; 3(4):285-97; and Nilsson et al., “Affinity fusion strategies for detection, purification, and immobilization of recombinant proteins”, Protein Expr Purif. 1997 October; 11(1):1-16.

[0303] The present invention also relates to further obvious variants of the variant polypeptides of the present invention, such as naturally-occurring mature forms (e.g., alleleic variants), non-naturally occurring recombinantly-derived variants, and orthologs and paralogs of such proteins that share sequence homology. Such variants can readily be generated using art-known techniques in the fields of recombinant nucleic acid technology and protein biochemistry. It is understood, however, that variants exclude those known in the prior art before the present invention.

[0304] Further variants of the variant polypeptides disclosed in Table 1 can comprise an amino acid sequence that shares at least 70-80%, 80-85%, 85-90%, 91%, 92%, 93%, 94%, 95%, 96%, 97%, 98%, or 99% sequence identity with an amino acid sequence disclosed in Table 1 (or a fragment thereof) and that includes a novel amino acid residue (allele) disclosed in Table 1 (which is encoded by a novel SNP allele). Thus, an aspect of the present invention that is specifically contemplated are polypeptides that have a certain degree of sequence variation compared with the polypeptide sequences shown in Table 1, but that contain a novel amino acid residue (allele) encoded by a novel SNP allele disclosed herein. In other words, as long as a polypeptide contains a novel amino acid residue disclosed herein, other portions of the polypeptide that flank the novel amino acid residue can vary to some degree from the polypeptide sequences shown in Table 1.

[0305] Full-length pre-processed forms, as well as mature processed forms, of proteins that comprise one of the amino acid sequences disclosed herein can readily be identified as having complete sequence identity to one of the variant proteins of the present invention as well as being encoded by the same genetic locus as the variant proteins provided herein.

[0306] Orthologs of a variant peptide can readily be identified as having some degree of significant sequence homology/identity to at least a portion of a variant peptide as well as being encoded by a gene from another organism. Preferred orthologs will be isolated from non-human mammals, preferably primates, for the development of human therapeutic targets and agents. Such orthologs can be encoded by a nucleic acid sequence that hybridizes to a variant peptide-encoding nucleic acid molecule under moderate to stringent conditions depending on the degree of relatedness of the two organisms yielding the homologous proteins.

[0307] Variant proteins include, but are not limited to, proteins containing deletions, additions and substitutions in the amino acid sequence caused by the SNPs of the present invention. One class of substitutions is conserved amino acid substitutions in which a given amino acid in a polypeptide is substituted for another amino acid of like characteristics. Typical conservative substitutions are replacements, one for another, among the aliphatic amino acids Ala, Val, Leu, and Ile; interchange of the hydroxyl residues Ser and Thr; exchange of the acidic residues Asp and Glu; substitution between the amide residues Asn and Gln; exchange of the basic residues Lys and Arg; and replacements among the aromatic residues Phe and Tyr. Guidance concerning which amino acid changes are likely to be phenotypically silent are found in, for example, Bowie et al., Science 247:1306-1310 (1990).

[0308] Variant proteins can be fully functional or can lack function in one or more activities, e.g. ability to bind another molecule, ability to catalyze a substrate, ability to mediate signaling, etc. Fully functional variants typically contain only conservative variations or variations in non-critical residues or in non-critical regions. Functional variants can also contain substitution of similar amino acids that result in no change or an insignificant change in function. Alternatively, such substitutions may positively or negatively affect function to some degree. Non-functional variants typically contain one or more non-conservative amino acid substitutions, deletions, insertions, inversions, truncations or extensions, or a substitution, insertion, inversion, or deletion of a critical residue or in a critical region.

[0309] Amino acids that are essential for function of a protein can be identified by methods known in the art, such as site-directed mutagenesis or alanine-scanning mutagenesis (Cunningham et al., Science 244:1081-1085 (1989)), particularly using the amino acid sequence and polymorphism information provided in Table 1. The latter procedure introduces single alanine mutations at every residue in the molecule. The resulting mutant molecules are then tested for biological activity such as enzyme activity or in assays such as an in vitro proliferative activity. Sites that are critical for binding partner/substrate binding can also be determined by structural analysis such as crystallization, nuclear magnetic resonance or photoaffinity labeling (Smith et al., J. Mol. Biol. 224:899-904 (1992); de Vos et al. Science 255:306-312 (1992)).

[0310] Polypeptides can contain amino acids other than the 20 amino acids commonly referred to as the 20 naturally occurring amino acids. Further, many amino acids, including the terminal amino acids, may be modified by natural processes, such as processing and other post-translational modifications, or by chemical modification techniques well known in the art. Accordingly, the variant proteins of the present invention also encompass derivatives or analogs in which a substituted amino acid residue is not one encoded by the genetic code, in which a substituent group is included, in which the mature polypeptide is fused with another compound, such as a compound to increase the half-life of the polypeptide (e.g., polyethylene glycol), or in which additional amino acids are fused to the mature polypeptide, such as a leader or secretory sequence or a sequence for purification of the mature polypeptide or a pro-protein sequence.

[0311] Known protein modifications include, but are not limited to, acetylation, acylation, ADP-ribosylation, amidation, covalent attachment of flavin, covalent attachment of a heme moiety, covalent attachment of a nucleotide or nucleotide derivative, covalent attachment of a lipid or lipid derivative, covalent attachment of phosphotidylinositol, cross-linking, cyclization, disulfide bond formation, demethylation, formation of covalent crosslinks, formation of cystine, formation of pyroglutamate, formylation, gamma carboxylation, glycosylation, GPI anchor formation, hydroxylation, iodination, methylation, myristoylation, oxidation, proteolytic processing, phosphorylation, prenylation, racemization, selenoylation, sulfation, transfer-RNA mediated addition of amino acids to proteins such as arginylation, and ubiquitination.

[0312] Such protein modifications are well known to those of skill in the art and have been described in great detail in the scientific literature. Several particularly common modifications, glycosylation, lipid attachment, sulfation, gamma-carboxylation of glutamic acid residues, hydroxylation and ADP-ribosylation, for instance, are described in most basic texts, such as Proteins—Structure and Molecular Properties, 2nd Ed., T. E. Creighton, W. H. Freeman and Company, New York (1993); Wold, F., Posttranslational Covalent Modification of Proteins, B. C. Johnson, Ed., Academic Press, New York 1-12 (1983); Seifter et al., Meth. Enzymol. 182: 626-646 (1990); and Rattan et al., Ann. N.Y. Acad. Sci. 663:48-62 (1992).

[0313] The present invention further provides fragments of the variant proteins in which the fragments contain one or more amino acid sequence variations (e.g., substitutions, or truncations or extensions due to creation or destruction of a stop codon) encoded by one or more SNPs disclosed herein. The fragments to which the invention pertains, however, are not to be construed as encompassing fragments that have been disclosed in the prior art before the present invention.

[0314] As used herein, a fragment may comprise at least about 4, 8, 10, 12, 14, 16, 18, 20, 25, 30, 50, 100 (or any other number in-between) or more contiguous amino acid residues from a variant protein, wherein at least one amino acid residue is affected by a SNP of the present invention, e.g., a variant amino acid residue encoded by a nonsynonymous nucleotide substitution at a cSNP position provided by the present invention. The variant amino acid encoded by a cSNP may occupy any residue position along the sequence of the fragment. Such fragments can be chosen based on the ability to retain one or more of the biological activities of the variant protein or the ability to perform a function, e.g., act as an immunogen. Particularly important fragments are biologically active fragments. Such fragments will typically comprise a domain or motif of a variant protein of the present invention, e.g., active site, transmembrane domain, or ligand/substrate binding domain. Other fragments include, but are not limited to, domain or motif-containing fragments, soluble peptide fragments, and fragments containing immunogenic structures. Predicted domains and functional sites are readily identifiable by computer programs well known to those of skill in the art (e.g., PROSITE analysis) (Current Protocols in Protein Science, John Wiley & Sons, N.Y. (2002)).

[0315] Uses of Variant Proteins

[0316] The variant proteins of the present invention can be used in a variety of ways, including but not limited to, in assays to determine the biological activity of a variant protein, such as in a panel of multiple proteins for high-throughput screening; to raise antibodies or to elicit another type of immune response; as a reagent (including the labeled reagent) in assays designed to quantitatively determine levels of the variant protein (or its binding partner) in biological fluids; as a marker for cells or tissues in which it is preferentially expressed (either constitutively or at a particular stage of tissue differentiation or development or in a disease state); as a target for screening for a therapeutic agent; and as a direct therapeutic agent to be administered into a human subject. Any of the variant proteins disclosed herein may be developed into reagent grade or kit format for commercialization as research products. Methods for performing the uses listed above are well known to those skilled in the art (see, e.g., Molecular Cloning: A Laboratory Manual, Cold Spring Harbor Laboratory Press, Sambrook and Russell, 2000, and Methods in Enzymology: Guide to Molecular Cloning Techniques, Academic Press, Berger, S. L. and A. R. Kimmel eds., 1987).

[0317] In a specific embodiment of the invention, the methods of the present invention include detection of one or more variant proteins disclosed herein. Variant proteins are disclosed in Table 1 and in the Sequence Listing as SEQ ID NOS: 16-30. Detection of such proteins can be accomplished using, for example, antibodies, small molecule compounds, aptamers, ligands/substrates, other proteins or protein fragments, or other protein-binding agents. Preferably, protein detection agents are specific for a variant protein of the present invention and can therefore discriminate between a variant protein of the present invention and the wild-type protein or another variant form. This can generally be accomplished by, for example, selecting or designing detection agents that bind to the region of a protein that differs between the variant and wild-type protein, such as a region of a protein that contains one or more amino acid substitutions that is/are encoded by a non-synonymous cSNP of the present invention, or a region of a protein that follows a nonsense mutation-type SNP that creates a stop codon thereby leading to a shorter polypeptide, or a region of a protein that follows a read-through mutation-type SNP that destroys a stop codon thereby leading to a longer polypeptide in which a portion of the polypeptide is present in one version of the polypeptide but not the other.

[0318] In another specific aspect of the invention, the variant proteins of the present invention are used as targets for diagnosing liver fibrosis or for determining predisposition to liver fibrosis in a human. Accordingly, the invention provides methods for detecting the presence of, or levels of, one or more variant proteins of the present invention in a cell, tissue, or organism. Such methods typically involve contacting a test sample with an agent (e.g., an antibody, small molecule compound, or peptide) capable of interacting with the variant protein such that specific binding of the agent to the variant protein can be detected. Such an assay can be provided in a single detection format or a multi-detection format such as an array, for example, an antibody or aptamer array (arrays for protein detection may also be referred to as “protein chips”). The variant protein of interest can be isolated from a test sample and assayed for the presence of a variant amino acid sequence encoded by one or more SNPs disclosed by the present invention. The SNPs may cause changes to the protein and the corresponding protein function/activity, such as through non-synonymous substitutions in protein coding regions that can lead to amino acid substitutions, deletions, insertions, and/or rearrangements; formation or destruction of stop codons; or alteration of control elements such as promoters. SNPs may also cause inappropriate post-translational modifications.

[0319] One preferred agent for detecting a variant protein in a sample is an antibody capable of selectively binding to a variant form of the protein (antibodies are described in greater detail in the next section). Such samples include, for example, tissues, cells, and biological fluids isolated from a subject, as well as tissues, cells and fluids present within a subject.

[0320] In vitro methods for detection of the variant proteins associated with liver fibrosis that are disclosed herein and fragments thereof include, but are not limited to, enzyme linked immunosorbent assays (ELISAs), radioimmunoassays (RIA), Western blots, immunoprecipitations, immunofluorescence, and protein arrays/chips (e.g., arrays of antibodies or aptamers). For further information regarding immunoassays and related protein detection methods, see Current Protocols in Immunology, John Wiley & Sons, N. Y., and Hage, “Immunoassays”, Anal Chem. 1999 Jun. 15; 71(12):294R-304R.

[0321] Additional analytic methods of detecting amino acid variants include, but are not limited to, altered electrophoretic mobility, altered tryptic peptide digest, altered protein activity in cell-based or cell-free assay, alteration in ligand or antibody-binding pattern, altered isoelectric point, and direct amino acid sequencing.

[0322] Alternatively, variant proteins can be detected in vivo in a subject by introducing into the subject a labeled antibody (or other type of detection reagent) specific for a variant protein. For example, the antibody can be labeled with a radioactive marker whose presence and location in a subject can be detected by standard imaging techniques.

[0323] Other uses of the variant peptides of the present invention are based on the class or action of the protein. For example, proteins isolated from humans and their mammalian orthologs serve as targets for identifying agents (e.g., small molecule drugs or antibodies) for use in therapeutic applications, particularly for modulating a biological or pathological response in a cell or tissue that expresses the protein. Pharmaceutical agents can be developed that modulate protein activity.

[0324] As an alternative to modulating gene expression, therapeutic compounds can be developed that modulate protein function. For example, many SNPs disclosed herein affect the amino acid sequence of the encoded protein (e.g., non-synonymous cSNPs and nonsense mutation-type SNPs). Such alterations in the encoded amino acid sequence may affect protein function, particularly if such amino acid sequence variations occur in functional protein domains, such as catalytic domains, ATP-binding domains, or ligand/substrate binding domains. It is well established in the art that variant proteins having amino acid sequence variations in functional domains can cause or influence pathological conditions. In such instances, compounds (e.g., small molecule drugs or antibodies) can be developed that target the variant protein and modulate (e.g., up- or down-regulate) protein function/activity.

[0325] The therapeutic methods of the present invention further include methods that target one or more variant proteins of the present invention. Variant proteins can be targeted using, for example, small molecule compounds, antibodies, aptamers, ligands/substrates, other proteins, or other protein-binding agents. Additionally, the skilled artisan will recognize that the novel protein variants (and polymorphic nucleic acid molecules) disclosed in Table 1 may themselves be directly used as therapeutic agents by acting as competitive inhibitors of corresponding art-known proteins (or nucleic acid molecules such as mRNA molecules).

[0326] The variant proteins of the present invention are particularly useful in drug screening assays, in cell-based or cell-free systems. Cell-based systems can utilize cells that naturally express the protein, a biopsy specimen, or cell cultures. In one embodiment, cell-based assays involve recombinant host cells expressing the variant protein. Cell-free assays can be used to detect the ability of a compound to directly bind to a variant protein or to the corresponding SNP-containing nucleic acid fragment that encodes the variant protein.

[0327] A variant protein of the present invention, as well as appropriate fragments thereof, can be used in high-throughput screening assays to test candidate compounds for the ability to bind and/or modulate the activity of the variant protein. These candidate compounds can be further screened against a protein having normal function (e.g., a wild-type/non-variant protein) to further determine the effect of the compound on the protein activity. Furthermore, these compounds can be tested in animal or invertebrate systems to determine in vivo activity/effectiveness. Compounds can be identified that activate (agonists) or inactivate (antagonists) the variant protein, and different compounds can be identified that cause various degrees of activation or inactivation of the variant protein.

[0328] Further, the variant proteins can be used to screen a compound for the ability to stimulate or inhibit interaction between the variant protein and a target molecule that normally interacts with the protein. The target can be a ligand, a substrate or a binding partner that the protein normally interacts with (for example, epinephrine or norepinephrine). Such assays typically include the steps of combining the variant protein with a candidate compound under conditions that allow the variant protein, or fragment thereof, to interact with the target molecule, and to detect the formation of a complex between the protein and the target or to detect the biochemical consequence of the interaction with the variant protein and the target, such as any of the associated effects of signal transduction.

[0329] Candidate compounds include, for example, 1) peptides such as soluble peptides, including Ig-tailed fusion peptides and members of random peptide libraries (see, e.g., Lam et al., Nature 354:82-84 (1991); Houghten et al., Nature 354:84-86 (1991)) and combinatorial chemistry-derived molecular libraries made of D- and/or L-configuration amino acids; 2) phosphopeptides (e.g., members of random and partially degenerate, directed phosphopeptide libraries, see, e.g., Songyang et al., Cell 72:767-778 (1993)); 3) antibodies (e.g., polyclonal, monoclonal, humanized, anti-idiotypic, chimeric, and single chain antibodies as well as Fab, F(ab′)₂, Fab expression library fragments, and epitope-binding fragments of antibodies); and 4) small organic and inorganic molecules (e.g., molecules obtained from combinatorial and natural product libraries).

[0330] One candidate compound is a soluble fragment of the variant protein that competes for ligand binding. Other candidate compounds include mutant proteins or appropriate fragments containing mutations that affect variant protein function and thus compete for ligand. Accordingly, a fragment that competes for ligand, for example with a higher affinity, or a fragment that binds ligand but does not allow release, is encompassed by the invention.

[0331] The invention further includes other end point assays to identify compounds that modulate (stimulate or inhibit) variant protein activity. The assays typically involve an assay of events in the signal transduction pathway that indicate protein activity. Thus, the expression of genes that are up or down-regulated in response to the variant protein dependent signal cascade can be assayed. In one embodiment, the regulatory region of such genes can be operably linked to a marker that is easily detectable, such as luciferase. Alternatively, phosphorylation of the variant protein, or a variant protein target, could also be measured. Any of the biological or biochemical functions mediated by the variant protein can be used as an endpoint assay. These include all of the biochemical or biological events described herein, in the references cited herein, incorporated by reference for these endpoint assay targets, and other functions known to those of ordinary skill in the art.

[0332] Binding and/or activating compounds can also be screened by using chimeric variant proteins in which an amino terminal extracellular domain or parts thereof, an entire transmembrane domain or subregions, and/or the carboxyl terminal intracellular domain or parts thereof, can be replaced by heterologous domains or subregions. For example, a substrate-binding region can be used that interacts with a different substrate than that which is normally recognized by a variant protein. Accordingly, a different set of signal transduction components is available as an end-point assay for activation. This allows for assays to be performed in other than the specific host cell from which the variant protein is derived.

[0333] The variant proteins are also useful in competition binding assays in methods designed to discover compounds that interact with the variant protein. Thus, a compound can be exposed to a variant protein under conditions that allow the compound to bind or to otherwise interact with the variant protein. A binding partner, such as ligand, that normally interacts with the variant protein is also added to the mixture. If the test compound interacts with the variant protein or its binding partner, it decreases the amount of complex formed or activity from the variant protein. This type of assay is particularly useful in screening for compounds that interact with specific regions of the variant protein (Hodgson, Bio/technology, 1992, September 10(9), 973-80).

[0334] To perform cell-free drug screening assays, it is sometimes desirable to immobilize either the variant protein or a fragment thereof, or its target molecule, to facilitate separation of complexes from uncomplexed forms of one or both of the proteins, as well as to accommodate automation of the assay. Any method for immobilizing proteins on matrices can be used in drug screening assays. In one embodiment, a fusion protein containing an added domain allows the protein to be bound to a matrix. For example, glutathione-S-transferase/¹²⁵I fusion proteins can be adsorbed onto glutathione sepharose beads (Sigma Chemical, St. Louis, Mo.) or glutathione derivatized microtitre plates, which are then combined with the cell lysates (e.g., ³⁵S-labeled) and a candidate compound, such as a drug candidate, and the mixture incubated under conditions conducive to complex formation (e.g., at physiological conditions for salt and pH). Following incubation, the beads can be washed to remove any unbound label, and the matrix immobilized and radiolabel determined directly, or in the supernatant after the complexes are dissociated. Alternatively, the complexes can be dissociated from the matrix, separated by SDS-PAGE, and the level of bound material found in the bead fraction quantitated from the gel using standard electrophoretic techniques.

[0335] Either the variant protein or its target molecule can be immobilized utilizing conjugation of biotin and streptavidin. Alternatively, antibodies reactive with the variant protein but which do not interfere with binding of the variant protein to its target molecule can be derivatized to the wells of the plate, and the variant protein trapped in the wells by antibody conjugation. Preparations of the target molecule and a candidate compound are incubated in the variant protein-presenting wells and the amount of complex trapped in the well can be quantitated. Methods for detecting such complexes, in addition to those described above for the GST-immobilized complexes, include immunodetection of complexes using antibodies reactive with the protein target molecule, or which are reactive with variant protein and compete with the target molecule, and enzyme-linked assays that rely on detecting an enzymatic activity associated with the target molecule.

[0336] Modulators of variant protein activity identified according to these drug screening assays can be used to treat a subject with a disorder mediated by the protein pathway, such as liver fibrosis. These methods of treatment typically include the steps of administering the modulators of protein activity in a pharmaceutical composition to a subject in need of such treatment.

[0337] The variant proteins, or fragments thereof, disclosed herein can themselves be directly used to treat a disorder characterized by an absence of, inappropriate, or unwanted expression or activity of the variant protein. Accordingly, methods for treatment include the use of a variant protein disclosed herein or fragments thereof.

[0338] In yet another aspect of the invention, variant proteins can be used as “bait proteins” in a two-hybrid assay or three-hybrid assay (see, e.g., U.S. Pat. No. 5,283,317; Zervos et al. (1993) Cell 72:223-232; Madura et al. (1993) J. Biol. Chem. 268:12046-12054; Bartel et al. (1993) Biotechniques 14:920-924; Iwabuchi et al. (1993) Oncogene 8:1693-1696; and Brent WO94/10300) to identify other proteins that bind to or interact with the variant protein and are involved in variant protein activity. Such variant protein-binding proteins are also likely to be involved in the propagation of signals by the variant proteins or variant protein targets as, for example, elements of a protein-mediated signaling pathway. Alternatively, such variant protein-binding proteins are inhibitors of the variant protein.

[0339] The two-hybrid system is based on the modular nature of most transcription factors, which typically consist of separable DNA-binding and activation domains. Briefly, the assay typically utilizes two different DNA constructs. In one construct, the gene that codes for a variant protein is fused to a gene encoding the DNA binding domain of a known transcription factor (e.g., GAL-4). In the other construct, a DNA sequence, from a library of DNA sequences, that encodes an unidentified protein (“prey” or “sample”) is fused to a gene that codes for the activation domain of the known transcription factor. If the “bait” and the “prey” proteins are able to interact, in vivo, forming a variant protein-dependent complex, the DNA-binding and activation domains of the transcription factor are brought into close proximity. This proximity allows transcription of a reporter gene (e.g., LacZ) that is operably linked to a transcriptional regulatory site responsive to the transcription factor. Expression of the reporter gene can be detected, and cell colonies containing the functional transcription factor can be isolated and used to obtain the cloned gene that encodes the protein that interacts with the variant protein.

[0340] Antibodies Directed to Variant Proteins

[0341] The present invention also provides antibodies that selectively bind to the variant proteins disclosed herein and fragments thereof. Such antibodies may be used to quantitatively or qualitatively detect the variant proteins of the present invention. As used herein, an antibody selectively binds a target variant protein when it binds the variant protein and does not significantly bind to non-variant proteins, i.e., the antibody does not significantly bind to normal, wild-type, or art-known proteins that do not contain a variant amino acid sequence due to one or more SNPs of the present invention (variant amino acid sequences may be due to, for example, nonsynonymous cSNPs, nonsense SNPs that create a stop codon, thereby causing a truncation of a polypeptide or SNPs that cause read-through mutations resulting in an extension of a polypeptide).

[0342] As used herein, an antibody is defined in terms consistent with that recognized in the art: they are multi-subunit proteins produced by an organism in response to an antigen challenge. The antibodies of the present invention include both monoclonal antibodies and polyclonal antibodies, as well as antigen-reactive proteolytic fragments of such antibodies, such as Fab, F(ab)′₂, and Fv fragments. In addition, an antibody of the present invention further includes any of a variety of engineered antigen-binding molecules such as a chimeric antibody (U.S. Pat. Nos. 4,816,567 and 4,816,397; Morrison et al., Proc. Natl. Acad. Sci. USA, 81:6851, 1984; Neuberger et al., Nature 312:604, 1984), a humanized antibody (U.S. Pat. Nos. 5,693,762; 5,585,089; and 5,565,332), a single-chain Fv (U.S. Pat. No. 4,946,778; Ward et al., Nature 334:544, 1989), a bispecific antibody with two binding specificities (Segal et al., J. Immunol. Methods 248:1, 2001; Carter, J. Immunol. Methods 248:7, 2001), a diabody, a triabody, and a tetrabody (Todorovska et al., J. Immunol. Methods, 248:47, 2001), as well as a Fab conjugate (dimer or trimer), and a minibody.

[0343] Many methods are known in the art for generating and/or identifying antibodies to a given target antigen (Harlow, Antibodies, Cold Spring Harbor Press, (1989)). In general, an isolated peptide (e.g., a variant protein of the present invention) is used as an immunogen and is administered to a mammalian organism, such as a rat, rabbit, hamster or mouse. Either a full-length protein, an antigenic peptide fragment (e.g., a peptide fragment containing a region that varies between a variant protein and a corresponding wild-type protein), or a fusion protein can be used. A protein used as an immunogen may be naturally-occurring, synthetic or recombinantly produced, and may be administered in combination with an adjuvant, including but not limited to, Freund's (complete and incomplete), mineral gels such as aluminum hydroxide, surface active substance such as lysolecithin, pluronic polyols, polyanions, peptides, oil emulsions, keyhole limpet hemocyanin, dinitrophenol, and the like.

[0344] Monoclonal antibodies can be produced by hybridoma technology (Kohler and Milstein, Nature, 256:495, 1975), which immortalizes cells secreting a specific monoclonal antibody. The immortalized cell lines can be created in vitro by fusing two different cell types, typically lymphocytes, and tumor cells. The hybridoma cells may be cultivated in vitro or in vivo. Additionally, fully human antibodies can be generated by transgenic animals (He et al., J. Immunol., 169:595, 2002). Fd phage and Fd phagemid technologies may be used to generate and select recombinant antibodies in vitro (Hoogenboom and Chames, Immunol. Today 21:371, 2000; Liu et al., J. Mol. Biol. 315:1063, 2002). The complementarity-determining regions of an antibody can be identified, and synthetic peptides corresponding to such regions may be used to mediate antigen binding (U.S. Pat. No. 5,637,677).

[0345] Antibodies are preferably prepared against regions or discrete fragments of a variant protein containing a variant amino acid sequence as compared to the corresponding wild-type protein (e.g., a region of a variant protein that includes an amino acid encoded by a nonsynonymous cSNP, a region affected by truncation caused by a nonsense SNP that creates a stop codon, or a region resulting from the destruction of a stop codon due to read-through mutation caused by a SNP). Furthermore, preferred regions will include those involved in function/activity and/or protein/binding partner interaction. Such fragments can be selected on a physical property, such as fragments corresponding to regions that are located on the surface of the protein, e.g., hydrophilic regions, or can be selected based on sequence uniqueness, or based on the position of the variant amino acid residue(s) encoded by the SNPs provided by the present invention. An antigenic fragment will typically comprise at least about 8-10 contiguous amino acid residues in which at least one of the amino acid residues is an amino acid affected by a SNP disclosed herein. The antigenic peptide can comprise, however, at least 12, 14, 16, 20, 25, 50, 100 (or any other number in-between) or more amino acid residues, provided that at least one amino acid is affected by a SNP disclosed herein.

[0346] Detection of an antibody of the present invention can be facilitated by coupling (i.e., physically linking) the antibody or an antigen-reactive fragment thereof to a detectable substance. Detectable substances include, but are not limited to, various enzymes, prosthetic groups, fluorescent materials, luminescent materials, bioluminescent materials, and radioactive materials. Examples of suitable enzymes include horseradish peroxidase, alkaline phosphatase, β-galactosidase, or acetylcholinesterase; examples of suitable prosthetic group complexes include streptavidin/biotin and avidin/biotin; examples of suitable fluorescent materials include umbelliferone, fluorescein, fluorescein isothiocyanate, rhodamine, dichlorotriazinylamine fluorescein, dansyl chloride or phycoerythrin; an example of a luminescent material includes luminol; examples of bioluminescent materials include luciferase, luciferin, and aequorin, and examples of suitable radioactive material include ¹²⁵I, ¹³¹I, ³⁵S or ³H.

[0347] Antibodies, particularly the use of antibodies as therapeutic agents, are reviewed in: Morgan, “Antibody therapy for Alzheimer's disease”, Expert Rev Vaccines. 2003 February; 2(1):53-9; Ross et al., “Anticancer antibodies”, Am J Clin Pathol. 2003 April; 119(4):472-85; Goldenberg, “Advancing role of radiolabeled antibodies in the therapy of cancer”, Cancer Immunol Immunother. 2003 May; 52(5):281-96. Epub 2003 Mar. 11; Ross et al., “Antibody-based therapeutics in oncology”, Expert Rev Anticancer Ther. 2003 February; 3(1):107-21; Cao et al., “Bispecific antibody conjugates in therapeutics”, Adv Drug Deliv Rev. 2003 Feb. 10; 55(2):171-97; von Mehren et al., “Monoclonal antibody therapy for cancer”, Annu Rev Med. 2003; 54:343-69. Epub 2001 Dec. 3; Hudson et al., “Engineered antibodies”, Nat Med. 2003 January; 9(1):129-34; Brekke et al., “Therapeutic antibodies for human diseases at the dawn of the twenty-first century”, Nat Rev Drug Discov. 2003 January; 2(1):52-62 (Erratum in: Nat Rev Drug Discov. 2003 March; 2(3):240); Houdebine, “Antibody manufacture in transgenic animals and comparisons with other systems”, Curr Opin Biotechnol. 2002 December; 13(6):625-9; Andreakos et al., “Monoclonal antibodies in immune and inflammatory diseases”, Curr Opin Biotechnol. 2002 December; 13(6):615-20; Kellermann et al., “Antibody discovery: the use of transgenic mice to generate human monoclonal antibodies for therapeutics”, Curr Opin Biotechnol. 2002 December; 13(6):593-7; Pini et al., “Phage display and colony filter screening for high-throughput selection of antibody libraries”, Comb Chem High Throughput Screen. 2002 November; 5(7):503-10; Batra et al., “Pharmacokinetics and biodistribution of genetically engineered antibodies”, Curr Opin Biotechnol. 2002 December; 13(6):603-8; and Tangri et al., “Rationally engineered proteins or antibodies with absent or reduced immunogenicity”, Curr Med Chem. 2002 December; 9(24):2191-9.

[0348] Uses of Antibodies

[0349] Antibodies can be used to isolate the variant proteins of the present invention from a natural cell source or from recombinant host cells by standard techniques, such as affinity chromatography or immunoprecipitation. In addition, antibodies are useful for detecting the presence of a variant protein of the present invention in cells or tissues to determine the pattern of expression of the variant protein among various tissues in an organism and over the course of normal development or disease progression. Further, antibodies can be used to detect variant protein in situ, in vitro, in a bodily fluid, or in a cell lysate or supernatant in order to evaluate the amount and pattern of expression. Also, antibodies can be used to assess abnormal tissue distribution, abnormal expression during development, or expression in an abnormal condition, such as liver fibrosis. Additionally, antibody detection of circulating fragments of the full-length variant protein can be used to identify turnover.

[0350] Antibodies to the variant proteins of the present invention are also useful in pharmacogenomic analysis. Thus, antibodies against variant proteins encoded by alternative SNP alleles can be used to identify individuals that require modified treatment modalities.

[0351] Further, antibodies can be used to assess expression of the variant protein in disease states such as in active stages of the disease or in an individual with a predisposition to a disease related to the protein's function, particularly liver fibrosis. Antibodies specific for a variant protein encoded by a SNP-containing nucleic acid molecule of the present invention can be used to assay for the presence of the variant protein, such as to screen for predisposition to liver fibrosis as indicated by the presence of the variant protein.

[0352] Antibodies are also useful as diagnostic tools for evaluating the variant proteins in conjunction with analysis by electrophoretic mobility, isoelectric point, tryptic peptide digest, and other physical assays well known in the art.

[0353] Antibodies are also useful for tissue typing. Thus, where a specific variant protein has been correlated with expression in a specific tissue, antibodies that are specific for this protein can be used to identify a tissue type.

[0354] Antibodies can also be used to assess aberrant subcellular localization of a variant protein in cells in various tissues. The diagnostic uses can be applied, not only in genetic testing, but also in monitoring a treatment modality. Accordingly, where treatment is ultimately aimed at correcting the expression level or the presence of variant protein or aberrant tissue distribution or developmental expression of a variant protein, antibodies directed against the variant protein or relevant fragments can be used to monitor therapeutic efficacy.

[0355] The antibodies are also useful for inhibiting variant protein function, for example, by blocking the binding of a variant protein to a binding partner. These uses can also be applied in a therapeutic context in which treatment involves inhibiting a variant protein's function. An antibody can be used, for example, to block or competitively inhibit binding, thus modulating (agonizing or antagonizing) the activity of a variant protein. Antibodies can be prepared against specific variant protein fragments containing sites required for function or against an intact variant protein that is associated with a cell or cell membrane. For in vivo administration, an antibody may be linked with an additional therapeutic payload such as a radionuclide, an enzyme, an immunogenic epitope, or a cytotoxic agent. Suitable cytotoxic agents include, but are not limited to, bacterial toxin such as diphtheria, and plant toxin such as ricin. The in vivo half-life of an antibody or a fragment thereof may be lengthened by pegylation through conjugation to polyethylene glycol (Leong et al., Cytokine 16:106, 2001).

[0356] The invention also encompasses kits for using antibodies, such as kits for detecting the presence of a variant protein in a test sample. An exemplary kit can comprise antibodies such as a labeled or labelable antibody and a compound or agent for detecting variant proteins in a biological sample; means for determining the amount, or presence/absence of variant protein in the sample; means for comparing the amount of variant protein in the sample with a standard; and instructions for use.

[0357] Vectors and Host Cells

[0358] The present invention also provides vectors containing the SNP-containing nucleic acid molecules described herein. The term “vector” refers to a vehicle, preferably a nucleic acid molecule, which can transport a SNP-containing nucleic acid molecule. When the vector is a nucleic acid molecule, the SNP-containing nucleic acid molecule can be covalently linked to the vector nucleic acid. Such vectors include, but are not limited to, a plasmid, single or double stranded phage, a single or double stranded RNA or DNA viral vector, or artificial chromosome, such as a BAC, PAC, YAC, or MAC.

[0359] A vector can be maintained in a host cell as an extrachromosomal element where it replicates and produces additional copies of the SNP-containing nucleic acid molecules. Alternatively, the vector may integrate into the host cell genome and produce additional copies of the SNP-containing nucleic acid molecules when the host cell replicates.

[0360] The invention provides vectors for the maintenance (cloning vectors) or vectors for expression (expression vectors) of the SNP-containing nucleic acid molecules. The vectors can function in prokaryotic or eukaryotic cells or in both (shuttle vectors).

[0361] Expression vectors typically contain cis-acting regulatory regions that are operably linked in the vector to the SNP-containing nucleic acid molecules such that transcription of the SNP-containing nucleic acid molecules is allowed in a host cell. The SNP-containing nucleic acid molecules can also be introduced into the host cell with a separate nucleic acid molecule capable of affecting transcription. Thus, the second nucleic acid molecule may provide a trans-acting factor interacting with the cis-regulatory control region to allow transcription of the SNP-containing nucleic acid molecules from the vector. Alternatively, a trans-acting factor may be supplied by the host cell. Finally, a trans-acting factor can be produced from the vector itself. It is understood, however, that in some embodiments, transcription and/or translation of the nucleic acid molecules can occur in a cell-free system.

[0362] The regulatory sequences to which the SNP-containing nucleic acid molecules described herein can be operably linked include promoters for directing mRNA transcription. These include, but are not limited to, the left promoter from bacteriophage λ, the lac, TRP, and TAC promoters from E. coli, the early and late promoters from SV40, the CMV immediate early promoter, the adenovirus early and late promoters, and retrovirus long-terminal repeats.

[0363] In addition to control regions that promote transcription, expression vectors may also include regions that modulate transcription, such as repressor binding sites and enhancers. Examples include the SV40 enhancer, the cytomegalovirus immediate early enhancer, polyoma enhancer, adenovirus enhancers, and retrovirus LTR enhancers.

[0364] In addition to containing sites for transcription initiation and control, expression vectors can also contain sequences necessary for transcription termination and, in the transcribed region, a ribosome-binding site for translation. Other regulatory control elements for expression include initiation and termination codons as well as polyadenylation signals. A person of ordinary skill in the art would be aware of the numerous regulatory sequences that are useful in expression vectors (see, e.g., Sambrook and Russell, 2000, Molecular Cloning: A Laboratory Manual, Cold Spring Harbor Laboratory Press, Cold Spring Harbor, N.Y.).

[0365] A variety of expression vectors can be used to express a SNP-containing nucleic acid molecule. Such vectors include chromosomal, episomal, and virus-derived vectors, for example, vectors derived from bacterial plasmids, from bacteriophage, from yeast episomes, from yeast chromosomal elements, including yeast artificial chromosomes, from viruses such as baculoviruses, papovaviruses such as SV40, Vaccinia viruses, adenoviruses, poxviruses, pseudorabies viruses, and retroviruses. Vectors can also be derived from combinations of these sources such as those derived from plasmid and bacteriophage genetic elements, e.g., cosmids and phagemids. Appropriate cloning and expression vectors for prokaryotic and eukaryotic hosts are described in Sambrook and Russell, 2000, Molecular Cloning: A Laboratory Manual, Cold Spring Harbor Laboratory Press, Cold Spring Harbor, N.Y.

[0366] The regulatory sequence in a vector may provide constitutive expression in one or more host cells (e.g., tissue specific expression) or may provide for inducible expression in one or more cell types such as by temperature, nutrient additive, or exogenous factor, e.g., a hormone or other ligand. A variety of vectors that provide constitutive or inducible expression of a nucleic acid sequence in prokaryotic and eukaryotic host cells are well known to those of ordinary skill in the art.

[0367] A SNP-containing nucleic acid molecule can be inserted into the vector by methodology well-known in the art. Generally, the SNP-containing nucleic acid molecule that will ultimately be expressed is joined to an expression vector by cleaving the SNP-containing nucleic acid molecule and the expression vector with one or more restriction enzymes and then ligating the fragments together. Procedures for restriction enzyme digestion and ligation are well known to those of ordinary skill in the art.

[0368] The vector containing the appropriate nucleic acid molecule can be introduced into an appropriate host cell for propagation or expression using well-known techniques. Bacterial host cells include, but are not limited to, E. coli, Streptomyces, and Salmonella typhimurium. Eukaryotic host cells include, but are not limited to, yeast, insect cells such as Drosophila, animal cells such as COS and CHO cells, and plant cells.

[0369] As described herein, it may be desirable to express the variant peptide as a fusion protein. Accordingly, the invention provides fusion vectors that allow for the production of the variant peptides. Fusion vectors can, for example, increase the expression of a recombinant protein, increase the solubility of the recombinant protein, and aid in the purification of the protein by acting, for example, as a ligand for affinity purification. A proteolytic cleavage site may be introduced at the junction of the fusion moiety so that the desired variant peptide can ultimately be separated from the fusion moiety. Proteolytic enzymes suitable for such use include, but are not limited to, factor Xa, thrombin, and enterokinase. Typical fusion expression vectors include pGEX (Smith et al., Gene 67:31-40 (1988)), pMAL (New England Biolabs, Beverly, Mass.) and pRIT5 (Pharmacia, Piscataway, N.J.) which fuse glutathione S-transferase (GST), maltose E binding protein, or protein A, respectively, to the target recombinant protein. Examples of suitable inducible non-fusion E. coli expression vectors include pTrc (Amann et al., Gene 69:301-315 (1988)) and pET 11d (Studier et al., Gene Expression Technology: Methods in Enzymology 185:60-89 (1990)).

[0370] Recombinant protein expression can be maximized in a bacterial host by providing a genetic background wherein the host cell has an impaired capacity to proteolytically cleave the recombinant protein (Gottesman, S., Gene Expression Technology: Methods in Enzymology 185, Academic Press, San Diego, Calif. (1990) 119-128). Alternatively, the sequence of the SNP-containing nucleic acid molecule of interest can be altered to provide preferential codon usage for a specific host cell, for example, E. coli (Wada et al., Nucleic Acids Res. 20:2111-2118 (1992)).

[0371] The SNP-containing nucleic acid molecules can also be expressed by expression vectors that are operative in yeast. Examples of vectors for expression in yeast (e.g., S. cerevisiae) include pYepSec1 (Baldari, et al., EMBO J. 6:229-234 (1987)), pMFa (Kurjan et al., Cell 30:933-943 (1982)), pJRY88 (Schultz et al., Gene 54:113-123 (1987)), and pYES2 (Invitrogen Corporation, San Diego, Calif.).

[0372] The SNP-containing nucleic acid molecules can also be expressed in insect cells using, for example, baculovirus expression vectors. Baculovirus vectors available for expression of proteins in cultured insect cells (e.g., Sf 9 cells) include the pAc series (Smith et al., Mol. Cell Biol. 3:2156-2165 (1983)) and the pVL series (Lucklow et al., Virology 170:31-39 (1989)).

[0373] In certain embodiments of the invention, the SNP-containing nucleic acid molecules described herein are expressed in mammalian cells using mammalian expression vectors. Examples of mammalian expression vectors include pCDM8 (Seed, B. Nature 329:840 (1987)) and pMT2PC (Kaufman et al., EMBO J. 6:187-195 (1987)).

[0374] The invention also encompasses vectors in which the SNP-containing nucleic acid molecules described herein are cloned into the vector in reverse orientation, but operably linked to a regulatory sequence that permits transcription of antisense RNA. Thus, an antisense transcript can be produced to the SNP-containing nucleic acid sequences described herein, including both coding and non-coding regions. Expression of this antisense RNA is subject to each of the parameters described above in relation to expression of the sense RNA (regulatory sequences, constitutive or inducible expression, tissue-specific expression).

[0375] The invention also relates to recombinant host cells containing the vectors described herein. Host cells therefore include, for example, prokaryotic cells, lower eukaryotic cells such as yeast, other eukaryotic cells such as insect cells, and higher eukaryotic cells such as mammalian cells.

[0376] The recombinant host cells can be prepared by introducing the vector constructs described herein into the cells by techniques readily available to persons of ordinary skill in the art. These include, but are not limited to, calcium phosphate transfection, DEAE-dextran-mediated transfection, cationic lipid-mediated transfection, electroporation, transduction, infection, lipofection, and other techniques such as those described in Sambrook and Russell, 2000, Molecular Cloning: A Laboratory Manual, Cold Spring Harbor Laboratory, Cold Spring Harbor Laboratory Press, Cold Spring Harbor, N.Y.).

[0377] Host cells can contain more than one vector. Thus, different SNP-containing nucleotide sequences can be introduced in different vectors into the same cell. Similarly, the SNP-containing nucleic acid molecules can be introduced either alone or with other nucleic acid molecules that are not related to the SNP-containing nucleic acid molecules, such as those providing trans-acting factors for expression vectors. When more than one vector is introduced into a cell, the vectors can be introduced independently, co-introduced, or joined to the nucleic acid molecule vector.

[0378] In the case of bacteriophage and viral vectors, these can be introduced into cells as packaged or encapsulated virus by standard procedures for infection and transduction. Viral vectors can be replication-competent or replication-defective. In the case in which viral replication is defective, replication can occur in host cells that provide functions that complement the defects.

[0379] Vectors generally include selectable markers that enable the selection of the subpopulation of cells that contain the recombinant vector constructs. The marker can be inserted in the same vector that contains the SNP-containing nucleic acid molecules described herein or may be in a separate vector. Markers include, for example, tetracycline or ampicillin-resistance genes for prokaryotic host cells, and dihydrofolate reductase or neomycin resistance genes for eukaryotic host cells. However, any marker that provides selection for a phenotypic trait can be effective.

[0380] While the mature variant proteins can be produced in bacteria, yeast, mammalian cells, and other cells under the control of the appropriate regulatory sequences, cell-free transcription and translation systems can also be used to produce these variant proteins using RNA derived from the DNA constructs described herein.

[0381] Where secretion of the variant protein is desired, which is difficult to achieve with multi-transmembrane domain containing proteins such as G-protein-coupled receptors (GPCRs), appropriate secretion signals can be incorporated into the vector. The signal sequence can be endogenous to the peptides or heterologous to these peptides.

[0382] Where the variant protein is not secreted into the medium, the protein can be isolated from the host cell by standard disruption procedures, including freeze/thaw, sonication, mechanical disruption, use of lysing agents, and the like. The variant protein can then be recovered and purified by well-known purification methods including, for example, ammonium sulfate precipitation, acid extraction, anion or cationic exchange chromatography, phosphocellulose chromatography, hydrophobic-interaction chromatography, affinity chromatography, hydroxylapatite chromatography, lectin chromatography, or high performance liquid chromatography.

[0383] It is also understood that, depending upon the host cell in which recombinant production of the variant proteins described herein occurs, they can have various glycosylation patterns, or may be non-glycosylated, as when produced in bacteria. In addition, the variant proteins may include an initial modified methionine in some cases as a result of a host-mediated process.

[0384] For further information regarding vectors and host cells, see Current Protocols in Molecular Biology, John Wiley & Sons, N.Y.

[0385] Uses of Vectors and Host Cells, and Transgenic Animals

[0386] Recombinant host cells that express the variant proteins described herein have a variety of uses. For example, the cells are useful for producing a variant protein that can be further purified into a preparation of desired amounts of the variant protein or fragments thereof. Thus, host cells containing expression vectors are useful for variant protein production.

[0387] Host cells are also useful for conducting cell-based assays involving the variant protein or variant protein fragments, such as those described above as well as other formats known in the art. Thus, a recombinant host cell expressing a variant protein is useful for assaying compounds that stimulate or inhibit variant protein function. Such an ability of a compound to modulate variant protein function may not be apparent from assays of the compound on the native/wild-type protein, or from cell-free assays of the compound. Recombinant host cells are also useful for assaying functional alterations in the variant proteins as compared with a known function.

[0388] Genetically-engineered host cells can be further used to produce non-human transgenic animals. A transgenic animal is preferably a non-human mammal, for example, a rodent, such as a rat or mouse, in which one or more of the cells of the animal include a transgene. A transgene is exogenous DNA containing a SNP of the present invention which is integrated into the genome of a cell from which a transgenic animal develops and which remains in the genome of the mature animal in one or more of its cell types or tissues. Such animals are useful for studying the function of a variant protein in vivo, and identifying and evaluating modulators of variant protein activity. Other examples of transgenic animals include, but are not limited to, non-human primates, sheep, dogs, cows, goats, chickens, and amphibians. Transgenic non-human mammals such as cows and goats can be used to produce variant proteins which can be secreted in the animal's milk and then recovered.

[0389] A transgenic animal can be produced by introducing a SNP-containing nucleic acid molecule into the male pronuclei of a fertilized oocyte, e.g., by microinjection or retroviral infection, and allowing the oocyte to develop in a pseudopregnant female foster animal. Any nucleic acid molecules that contain one or more SNPs of the present invention can potentially be introduced as a transgene into the genome of a non-human animal.

[0390] Any of the regulatory or other sequences useful in expression vectors can form part of the transgenic sequence. This includes intronic sequences and polyadenylation signals, if not already included. A tissue-specific regulatory sequence(s) can be operably linked to the transgene to direct expression of the variant protein in particular cells or tissues.

[0391] Methods for generating transgenic animals via embryo manipulation and microinjection, particularly animals such as mice, have become conventional in the art and are described in, for example, U.S. Pat. Nos. 4,736,866 and 4,870,009, both by Leder et al., U.S. Pat. No. 4,873,191 by Wagner et al., and in Hogan, B., Manipulating the Mouse Embryo, (Cold Spring Harbor Laboratory Press, Cold Spring Harbor, N. Y., 1986). Similar methods are used for production of other transgenic animals. A transgenic founder animal can be identified based upon the presence of the transgene in its genome and/or expression of transgenic mRNA in tissues or cells of the animals. A transgenic founder animal can then be used to breed additional animals carrying the transgene. Moreover, transgenic animals carrying a transgene can further be bred to other transgenic animals carrying other transgenes. A transgenic animal also includes a non-human animal in which the entire animal or tissues in the animal have been produced using the homologously recombinant host cells described herein.

[0392] In another embodiment, transgenic non-human animals can be produced which contain selected systems that allow for regulated expression of the transgene. One example of such a system is the cre/loxP recombinase system of bacteriophage P1 (Lakso et al. PNAS 89:6232-6236 (1992)). Another example of a recombinase system is the FLP recombinase system of S. cerevisiae (O'Gorman et al. Science 251:1351-1355 (1991)). If a cre/loxP recombinase system is used to regulate expression of the transgene, animals containing transgenes encoding both the Cre recombinase and a selected protein are generally needed. Such animals can be provided through the construction of “double” transgenic animals, e.g., by mating two transgenic animals, one containing a transgene encoding a selected variant protein and the other containing a transgene encoding a recombinase.

[0393] Clones of the non-human transgenic animals described herein can also be produced according to the methods described in, for example, Wilmut, I. et al. Nature 385:810-813 (1997) and PCT International Publication Nos. WO 97/07668 and WO 97/07669. In brief, a cell (e.g., a somatic cell) from the transgenic animal can be isolated and induced to exit the growth cycle and enter Gₒ phase. The quiescent cell can then be fused, e.g., through the use of electrical pulses, to an enucleated oocyte from an animal of the same species from which the quiescent cell is isolated. The reconstructed oocyte is then cultured such that it develops to morula or blastocyst and then transferred to pseudopregnant female foster animal. The offspring born of this female foster animal will be a clone of the animal from which the cell (e.g., a somatic cell) is isolated.

[0394] Transgenic animals containing recombinant cells that express the variant proteins described herein are useful for conducting the assays described herein in an in vivo context. Accordingly, the various physiological factors that are present in vivo and that could influence ligand or substrate binding, variant protein activation, signal transduction, or other processes or interactions, may not be evident from in vitro cell-free or cell-based assays. Thus, non-human transgenic animals of the present invention may be used to assay in vivo variant protein function as well as the activities of a therapeutic agent or compound that modulates variant protein function/activity or expression. Such animals are also suitable for assessing the effects of null mutations (i.e., mutations that substantially or completely eliminate one or more variant protein functions).

[0395] For further information regarding transgenic animals, see Houdebine, “Antibody manufacture in transgenic animals and comparisons with other systems”, Curr Opin Biotechnol. 2002 December; 13(6):625-9; Petters et al., “Transgenic animals as models for human disease”, Transgenic Res. 2000; 9(4-5):347-51; discussion 345-6; Wolf et al., “Use of transgenic animals in understanding molecular mechanisms of toxicity”, J Pharm Pharmacol. 1998 June; 50(6):567-74; Echelard, “Recombinant protein production in transgenic animals”, Curr Opin Biotechnol. 1996 October; 7(5):536-40; Houdebine, “Transgenic animal bioreactors”, Transgenic Res. 2000; 9(4-5):305-20; Pirity et al., “Embryonic stem cells, creating transgenic animals”, Methods Cell Biol. 1998; 57:279-93; and Robl et al., “Artificial chromosome vectors and expression of complex proteins in transgenic animals”, Theriogenology. 2003 Jan. 1; 59 (1):107-13.

### Examples

[0396] The following examples are offered to illustrate, but not to limit the claimed invention.

### Example One

### Statistical Analysis of SNPs Associated with Liver Fibrosis

[0397] A case-control genetic study was performed to determine the association of SNPs in the human genome with liver fibrosis and in particular the increased or decreased risk of developing bridging fibrosis/cirrhosis, and the rate of progression of fibrosis in HCV infected patients. The stage of fibrosis in each individual was determined according to the system of Batts et al., Am J. Surg. Pathol. 19:1409-1417 (1995) as reviewed by Brunt Hepatology 31:241-246 (2000).

[0398] The study involved genotyping SNPs in DNA samples obtained from >500 HCV-infected patients. The study population came from two clinic sites, the University of California, San Francisco (UCSF) and Virginia Commonwealth University (VCU).

[0399] Initial studies were done on pooled samples, in which DNA samples from about 50 individuals were pooled and allele frequencies were obtained using a PRISM® 7900 HT Sequence Detection System (Applied Biosystems, Foster City, Calif.) by kinetic allele-specific PCR similar to the method described by Germer et al., Genome Research 10:258-266 (2000). SNP markers in the extracted DNA samples were analyzed by genotyping using primers such as those presented in Table 5 below.

[0400] Table 5 provides sequences (SEQ ID NOS: 73-93) of primers that have been synthesized and used in the laboratory to carry out allele-specific PCR reactions in order to assay the SNPs disclosed in Tables 6 and 7 during the course of association studies to verify the association of these SNPs with liver fibrosis.

[0401] Table 5 provides the following:
[0402] the column labeled “Marker” provides an hCV identification number for each SNP site
[0403] the column labeled “Alleles” designates the two alternative alleles at the SNP site identified by the hCV identification number that are targeted by the allele-specific primers (the allele-specific primers are shown as “Primer 1” and “Primer 2”) [NOTE: Alleles may be presented in Table 5 based on a different orientation (i.e., the reverse complement) relative to how the same alleles are presented in Tables 1-4, 11, and 12].
[0404] the column labeled “Primer 1 (allele-specific primer)” provides an allele-specific primer that is specific for an allele designated in the “Alleles” column
[0405] the column labeled “Primer 2 (allele-specific primer)” provides an allele-specific primer that is specific for the other allele designated in the “Alleles” column
[0406] the column labeled “Common Primer” provides a common primer that is used in conjunction with each of the allele-specific primers (the “Primer 1” primer and the “Primer 2” primer) and which hybridizes at a site away from the SNP position.

[0407] All primer sequences are given in the 5′ to 3′ direction.

[0408] Each of the nucleotides designated in the “Alleles” column matches or is the reverse complement of (depending on the orientation of the primer relative to the designated allele) the 3′ nucleotide of the allele-specific primer (either “Primer 1” or “Primer 2”) that is specific for that allele. For instance, Primer 1 for hCV11367838 can be used to detect the reverse complement of the C allele listed in the “Allele” column in Table 5, whereas Primer 1 for hCV1381377 can be used to detect the A allele listed in the “Allele” column in Table 5.

TABLE 5
Primers

| | | Primer 1 | Primer 2 | |
|---|---|---|---|---|
| | | (Allele-specific | (Allele-specific | |
| Marker | Alleles | Primer) | Primer) | Common Primer |
| hCV11367838 | C/T | CCCTACCTCCAAGGT | CCCTACCTCCAAGGT | AATGTGGTGGCCTGA |
| | | GC | GT | GAG |
| | | (SEQ ID NO: 73) | (SEQ ID NO: 74) | (SEQ ID NO: 75) |
| hCV11722237 | C/T | CAAAGTGATTTTGGG | CAAAGTGATTTTGGG | GAATACTGAAAACTC |
| | | ACAAC | ACAAT | ACTCATTTGT |
| | | (SEQ ID NO: 76) | (SEQ ID NO: 77) | (SEQ ID NO: 78) |
| hCV1381377 | A/G | CAGCGTGGCTGTCTG | CAGCGTGGCTGTCTG | TCCCTCTGGGACTCT |
| | | TT | TC | CATACT |
| | | (SEQ ID NO: 79) | (SEQ ID NO: 80) | (SEQ ID NO: 81) |
| hCV1721645 | C/G | CAGCTGGTCCAGACT | CAGCTGGTCCAGACT | GGCAGGGCCTTTCAT |
| | | G | C | CTTCT |
| | | (SEQ ID NO: 82) | (SEQ ID NO: 83) | (SEQ ID NO: 84) |
| hCV25635059 | A/G | AACAGAGGCTCATCT | ACAGAGGCTCATCTT | TGAGCACATTGGATC |
| | | TCCTTA | CCTTG | TGAGACAG |
| | | (SEQ ID NO: 85) | (SEQ ID NO: 86) | (SEQ ID NO: 87) |
| hCV25647188 | A/G | CATCTCTCCTTGTCT | ATCTCTCCTTGTCTG | CAGTGAAGGAATGAA |
| | | GTTCA | TTCG | TGAATACAA |
| | | (SEQ ID NO: 88) | (SEQ ID NO: 89) | (SEQ ID NO: 90) |
| hCV3187664 | C/G | GCATGGAGACAGGTA | GCATGGAGACAGGTA | CAACATCACAGCTTA |
| | | GACAC | GACAG | AAGATACAA |
| | | (SEQ ID NO: 91) | (SEQ ID NO: 92) | (SEQ ID NO: 93) |

[0409] I. Sample Description

[0410] The first sample set was collected from the clinic site at the University of California San Francisco (UCSF). This sample set consisted of 537 patients. The percent of patients with No fibrosis (stage 0), Portal/Periportal Fibrosis (Stage 1-2) and Bridging fibrosis/Cirrhosis (stage 3-4) in the sample set are 25.9%, 49.0%, and 25.1% respectively. These three stages can also be described as minimal, moderate, and severe fibrosis, respectively. In this study design, the aim was to discover SNPs that can effectively distinguish the following two groups of patients: patients at stage 0 as a control group, and patients at stage 3 and 4 as case group.

[0411] The second sample set was collected from the clinic site at the Virginia Commonwealth University (VCU). This sample set consisted of 483 patients. The percent of patients with No fibrosis (stage 0), Portal/Periportal fibrosis (Stage 1-2) and Bridging fibrosis/Cirrhosis (stage 3-4) in the sample set are 17.4%, 34.2%, and 48.4% respectively. The UCSF sample set was used as a discovery set, and the VCU sample set was used as a replication set.

[0412] Detailed clinical data can be found in Table 6. All patients from the sample set met the inclusion/exclusion criteria in study protocol (see Table 7). In addition, all patients had signed informed, written consent and the study protocols were approved by the respective Institutional Review Boards (IRB).

TABLE 6
Summary of clinic data

| | UCSF | | VCU | |
|---|---|---|---|---|
| | Number | (SD)/Range/% | Number | (SD)/Range/% |
| # of patients | 537 | | 483 | |
| Gender (M/F) | | | | |
| Male | 453 | 84.4% | 279 | 57.8% |
| Female | 84 | 15.6% | 204 | 42.2% |
| Age | | | | |
| Mean | 52.6 | (7.3) | 50.8 | (8.3) |
| Median | 53 | 22-81 | 50 | 19-74 |
| Age at Bx | | | | |
| Mean | 50.35 | (7.51) | 47.7 | (8.3) |
| Fibrosis score* | | | | |
| 0 | 139 | 25.9% | 84 | 17.4% |
| 1 | 141 | 26.3% | 165 | 34.2% |
| 2 | 122 | 22.7% | 0 | 0.0% |
| 3 | 79 | 14.7% | 114 | 23.6% |
| 4 | 56 | 10.4% | 120 | 24.8% |
| Missing | 0 | 0.0% | 0 | 0.0% |
| Mean | 1.6 | (1.3) | 2.04 | (1.5) |
| Median | 1 | 0-4 | 1 | 0-4 |
| Inflammation | | | | |
| score | | | | |
| Mean | 1.77 | (0.74) | 6.30 | (2.52) |
| Median | 2 | 0-4 | 7 | 1-12 |
| Ethnicity | | | | |
| Caucasian | 367 | 68.3% | 341 | 70.6% |
| African-American | 78 | 14.5% | 127 | 26.3% |
| Others | 92 | 17.1% | 15 | 3.1% |
| Missing | 0 | 0.0% | 0 | 0.0% |
| Age at infection | | | | |
| Mean | 22.9 | (7.6) | 26.0 | (9.3) |
| Median | 21 | 0-61 | 24.5 | 0-58.5 |
| Duration | | | | |
| of infection | | | | |
| Patients with | 395 | 73.6% | 347 | 71.8% |
| duration | | | | |
| Mean | 27.6 | (7.4) | 21.9 | (8.5) |
| Median | 29 | 1-39 | 21 | 0-58.5 |
| Fibrosis rate | | | | |
| Mean | 0.068 | (0.158) | 0.087 | (0.446) |
| Median | 0.06 | 0-3 | 0.085 | 0-1.11 |
| Risk factors | | | | |
| Unknown | 138 | 25.7% | 149 | 30.8% |
| IVDU | 277 | 51.6% | 179 | 37.1% |
| BT | 63 | 11.7% | 122 | 25.3% |
| IVDU/BT | 59 | 11.0% | 33 | 6.8% |
| Other | 0 | 0.0% | 0 | 0.0% |
| Alcohol (daily) | | | | |
| Unknown | 0 | 0.0% | 0 | 0.0% |
| =0 | 161 | 30.0% | 74 | 15.3% |
| <20 | 56 | 10.4% | 234 | 48.4% |
| =20 to 50 | 73 | 13.6% | 97 | 20.1% |
| =50 to 80 | 52 | 9.7% | 47 | 9.7% |
| =>80 | 195 | 36.3% | 31 | 6.4% |
| Men | | | | |
| Mean | 89.9 | (110.50) | 29.5 | (33.0) |
| Median | 45 | 0-600 | 18.4 | 0-236.71 |
| Women | | | | |
| Mean | 58.1 | (101.94) | 16.3 | (28.3) |
| Median | 15 | 0-513 | 4.9 | 0-151.74 |
| CAGE >2 (3 or 4) | 220 | 41.0% | N/A | N/A |
| Viral Genotype | | | | |
| Unknown | 52 | 9.7% | 49 | 10.1% |
| Type 1 | 338 | 62.9% | 347 | 71.8% |
| 2 & 3 | 141 | 26.3% | 80 | 16.6% |
| Mixed and others | 6 | 1.1% | 7 | 1.4% |

* UCSF uses Batts-Ludwig scoring system, VCU uses Knodell scoring system

TABLE 7
Sample enrollment: inclusion/exclusion criteria

Inclusion Criteria
Adults (Age 18 ~ 75).
Evidence of active HCV infection as shown by a positive anti-HCV antibody AND detectable
HCV —RNA in serum.
Patient should be treatment naïve at the time of liver biopsy or clinical evidence of cirrhosis
All patients should sign informed consent for genetic study
Exclusion Criteria
Evidence of co-infection with HBV and/or HIV
Evidence of hepatocelluar carcinoma
Evidence of another co-existing etiology of chronic liver disease (e.g. Wilson's disease,
hemochromatosis, autoimmune hepatitis).
Clinical information: information should include, but not limited to, the following:
Demographics
Date of birth
Height
Weight
Sex
Ethnicity
Risk factors for infection
IV drug
Blood transfusion
history of jaundice that was attributable to HCV
Year of infection (estimated)
Alcohol data
Daily and lifetime alcohol consumption
CAGE score
Liver biopsy
Fibrosis stage
Inflammation grade
Steatosis grade
Lab test results (dated within 1 year to Bx except for HCV genotype)
ALT
AST
Bilirubin
Albumin
Platelets
HCV genotype and viral load
Other medical history, including major medical conditions such as diabetes, metabolic syndrome
(hyperlipidemia, hypertension), alcoholic liver disease

[0413] II. Pooling in Functional Genome Scan (FGS)

[0414] Testing was performed for association of single nucleotide polymorphism (SNP) alleles in the human genome with fibrosis risk in HCV patients. For pooling studies, DNAs from patient samples were pooled based on their similar clinical phenotypes. DNA was extracted from individual blood samples using conventional DNA extraction methods or by using commercially available kits according to manufacturer's suggested conditions, such as the QIA-amp kit from Qiagen (Valencia, Calif.).

[0415] In the first half of FGS, 33 pools were generated in UCSF samples to address four clinic outcomes: fibrosis stage, fibrosis progression rate, fibrosis progression risk, inflammation, and enable the stratified analysis on gender and ethnicity (Caucasian and other). In the second half, 8 pools were generated in UCSF and 6 pools were generated in VCU to address only fibrosis stage and stratified only by ethnicity. See Table 8 and Table 9 for pool details.

[0416] Genotypes and pool allele frequencies were measured using a PRISM 7900HT sequence detection PCR system (Applied Biosystems) by allele-specific PCR, similar to the method described by Germer et al (Germer S., Holland M. J., Higuchi R. 2000, Genome Res. 10: 258-266).

TABLE 8
1^{st} half of the Genome Scan Table

| 1st Half of Genome Scan | | | |
|---|---|---|---|
| UCSF | Clinic Phenotype | Strata | Pool size |
| Stage + Gender | Stage 0 & 1 | Male | 158 |
| | | female | 43 |
| | Stage 2 | Male | 97 |
| | | female | 16 |
| | Stage 3 & 4 | Male | 109 |
| | | female | 12 |
| Stage + Ethnicity | Stage 0 & 1 | Caucasian | 137 |
| | | otherEthnicity | 64 |
| | Stage 2 | Caucasian | 76 |
| | | otherEthnicity | 37 |
| | Stage 3 & 4 | Caucasian | 87 |
| | | otherEthnicity | 34 |
| Rate + Gender | Rate:Tertile1 | Male | 109 |
| | | female | 26 |
| | Rate:Tertile2 | Male | 112 |
| | | female | 24 |
| | Rate:Tertile3 | Male | 120 |
| | | female | 19 |
| Rate + Ethnicity | Rate:Tertile1 | Caucasian | 94 |
| | | otherEthnicity | 41 |
| | Rate:Tertile2 | Caucasian | 100 |
| | | otherEthnicity | 36 |
| | Rate:Tertile3 | Caucasian | 93 |
| | | otherEthnicity | 46 |
| Inflammation | Infl Grade 0 & 1 | | 124 |
| | Infl Grade 2 | | 244 |
| | Infl Grade 3 & 4 | | 63 |
| Progression Risk | Low risk | Caucasian | 102 |
| | Medium risk | Caucasian | 122 |
| | High risk | Caucasian | 76 |
| | Low risk | otherEthnicity | 53 |
| | Medium risk | otherEthnicity | 36 |
| | High risk | otherEthnicity | 46 |

TABLE 9
2^{nd} half of the Genome Scan Table

| 2nd Half of Genome Scan | Clinic Phenotype | Strata | Pool size |
|---|---|---|---|
| UCSF | | | |
| Stage + Ethnicity | Stage 0 | Caucasian | 92 |
| | | otherEthnicity | 47 |
| | Stage 1 | Caucasian | 98 |
| | | otherEthnicity | 43 |
| | Stage 2 | Caucasian | 82 |
| | | otherEthnicity | 40 |
| | Stage 3 & 4 | Caucasian | 94 |
| | | otherEthnicity | 41 |
| VCU | | | |
| Stage + Ethnicity | Stage 0 | Caucasian | 64 |
| | | otherEthnicity | 20 |
| | Stage 1 | Caucasian | 108 |
| | | otherEthnicity | 57 |
| | Stage 3 & 4 | Caucasian | 169 |
| | | otherEthnicity | 65 |

[0417] III. SNPs in Functional Genome Scan (FGS)

[0418] The FGS consisted of 24,823 gene-centric SNPs composed of 68.3% coding functional SNPs (missense, nonsense, acceptor and donor splice sites); 24.9% non-coding putative regulatory SNPs that may effect RNA stability (SNPs located at putative transcription factor binding sites, or 5′/3′ un-translated regions); and 6.8% other types of SNPs, including 1.8% intergenic (including Human mouse conserved regions), 1.7% silent and 3.3% intronic SNPs. A total of 12,248 genes were directly covered by the scan. Most genes were tested with only one SNP. However 1,418 genes had 4 or more SNPs. Allele odds ratios and p-values were generated comparing the advanced or high fibrosis stage group (case group) (also known as bridging fibrosis/cirrhosis) vs. medium and low groups (mild or no fibrosis) (control group). Results were stratified by ethnicity (all ethnic groups (A) Caucasian (C) and other than Caucasian (O)) for the stage outcome to assess any confounding by these factors.

[0419] IV. Candidate SNPs for Individual Genotyping: Pool Hits from FGS

[0420] A total of 361 SNPs were selected including 295 SNPs for confirmation by individual genotyping if they are replicated hits in one of the seven endpoints (Table 10) based on the pooling data; 35 SNPs for the follow-up fine density mapping of hCV7450990 (DDX5), hCV15851335 (CPT1A), hCV11935588 (unknown) and MTP; the remaining 31 SNPs were selected using other fibrosis analysis methods as potential hits. Data in Table 10 represents the coverage of pool hits for each endpoint. WGS stands for whole genome scan.

TABLE 10
Coverage of genome scan hits for each endpoint

| Endpoint¹ | UCSF² | VCU³ | Strata^{4,8} | WGS hits⁵ | SNPs typed⁶ | %⁷ |
|---|---|---|---|---|---|---|
| S1 | 0 vs 1234 | 0 vs 134 | All or Cauc | 167 | 78 | 46.7% |
| | | | Cauc | 87 | 55 | 63.2% |
| S2 | 01 vs 234 | 0 vs 134 | All or Cauc | 200 | 105 | 52.5% |
| | | | Cauc | 82 | 58 | 70.7% |
| S3 | 012 vs 34 | 01 vs 34 | All or Cauc | 284 | 172 | 60.6% |
| | | | Cauc | 106 | 103 | 97.2% |
| S5 | 0 vs 34 | 0 vs 34 | All or Cauc | 230 | 164 | 71.3% |
| | | | Cauc | 96 | 95 | 99.0% |
| S6 | 01 vs 34 | 0 vs 34 | All or Cauc | 231 | 163 | 70.6% |
| | | | Cauc | 96 | 95 | 99.0% |
| 3levels1 | 0 vs 12 vs 34 | 0 vs 1 vs 34 | All or Cauc | 397 | 177 | 44.6% |
| | | | Cauc | 201 | 107 | 53.2% |
| 3levels2 | 01 vs 2 vs 34 | 0 vs 1 vs 34 | All or Cauc | 423 | 182 | 43.0% |
| | | | Cauc | 212 | 109 | 51.4% |

Legend for Table 10:
¹The label chosen to describe the endpoint
²The fibrosis stages that were defined as controls and cases (in the format “control vs case”) for the discovery set UCSF. (In the case of 3levels, the patients are divided into three groups based on their fibrosis stage in order to perform a trend analysis.)
³The same as (2) for the replication set VCU
⁴In which strata analysis (All patients or Caucasian only) the marker was found significant
⁵The number of markers in the whole genome scan that were found significant by using 2-tailed p values for UCSF and 1-tailed p values for VCU
⁶The number of markers chosen to be individually typed
⁷The percentage of markers chosen to be individually typed
⁸Genome scan analysis was done using 1) all patients (ALL) and 2) Caucasian only patients (CAUC). For the ALL strata, the Cochran-Mantel-Haenszel p-value was used, adjusted for ethnicity. For the CAUC strata, Fisher's Exact p-value was used. Hits were chosen by setting the p-value cutoff at <=0.05 for the 2-tailed p-value in UCSF and 1-tailed p-value in VCU

[0421] V. Confirmed Hits from Individual Genotyping Data

[0422] For each of the 7 endpoints as listed in Table 10, the following 4 types of data analysis were performed on 3 strata 1) all patients (ALL), 2) Caucasian only patients (CAUC), and 3) Non-Caucasian patients (OTHERETHN). For the ALL strata, the Cochran-Mantel-Haenszel p-value was used, adjusted for ethnicity. For the CAUC and OTHERETHN strata, Fisher's Exact p-value was used.

[0423] A. Allelic association: for all 361 SNPs, using UCSF as the discovery set and VCU as the replication set. Hits were defined as those with p-value cutoff at <=0.05 for the 2-tailed p-value in UCSF and the 1-tailed p-value in VCU, calculated based on the same allele.

[0424] B. Allelic association: for all 361 SNPs, using combined UCSF and VCU samples. Hits were defined as those with p-value cutoff at <=0.05.

[0425] C. Genotypic association: for all 361 SNPs, using combined UCSF and VCU samples, with the major homozygote used as the reference. Hits were defined as those with p-value cutoff at <=0.05.

[0426] D. Genotypic association: for the 53 SNPs not found to be hits in analysis A-C, using UCSF as the discovery set and VCU as the replication set. Hits were defined as those with p-value cutoff at <=0.05 for the 2-tailed p-value in UCSF and the 1-tailed p-value in VCU, calculated based on the same reference genotype. Only one additional hit (hCV11611201) was found by this analysis.

[0427] Results of the analysis for 7 SNP markers are presented in Table 11. A marker having an odds ratio (OR) <1.0 is protective (e.g., an individual is less likely to develop severe liver fibrosis), whereas a marker having an odds ratio (OR) >1.0 is associated with an increased risk (e.g., an individual is more likely to develop severe liver fibrosis). For statistical analysis, the outcomes include only fibrosis stage (categorized into 0 for controls and 3+4 for cases) (and identified as “stage” in Table 11). Genotypes were categorized into ordinal (three groups, including major homozygotes, heterozygotes, and minor homozygotes) as well as using a dominant model assumption (two groups, including major homozygotes versus heterozygotes+minor homozygotes). Multiple logistic regression as well as proportional logistic regression analysis was used to generate age-adjusted odds ratios and 95% confidence intervals to assess the association between the genotypes and fibrosis stage.

[0428] The Allelic Association, Fischer Exact Test, and Cochran-Mantel-Haenszel p-value test were used to analyze the association of a SNP with fibrosis stages. In replication studies, a SNP was considered a replicated marker only if it had a significant p-value <0.05 for a particular stage in the UCSF sample set and the VCU sample set, and the Odds Ratio (OR) had to go in the same direction—that is, the regression coefficient had to have the same sign in each of the UCSF and VCU sample sets. There were over 300 markers that met the selection criteria as described in this example. Here, results for 7 of them are presented, showing these seven markers are associated with the development of severe fibrosis (Table 11).

[0429] For example, marker hCV25635059 is a replicated marker when all patients as well as the Caucasian only population (but not patients other than Caucasian populations) were analyzed. This particular SNP has the G allele being a risk allele with OR >1. On the other hand, for SNP hCV11367838, this SNP has the T allele being a protective, or non-risk allele with OR <1. In that case, the other allele at SNP position hCV11367838, the C allele as given in Table 5, would be associated with increased risk. For reference, Table 5 shows the two alleles of each SNP position of the 7 SNPs that are associated with altered risk of developing fibrosis.

[0430] The SNPs disclosed herein could be used to identify other markers that are associated with and increased risk of developing bridging fibrosis/cirrhosis, and progression of fibrosis in HCV-infected individuals and other liver disease patients. For example, the markers listed in Tables 11-12 can be used to identify other mutations (preferably SNPs), such as those that exhibit similar or enhanced predictive value, in the identified genes or surrounding nucleotide sequence (e.g., 500 Kb upstream to 500 Kb downstream of the marker) through database searches or through sequencing of DNA samples.

[0431] The SNPs disclosed herein, alone, or in combination with other risk factors, such as age, gender, and alcohol consumption, can provide a non-invasive test that enables physicians to assess the fibrosis risk in HCV-infected individuals. Such a test offers several advantages, such as: 1) enabling better treatment strategies (for example, individuals with a higher fibrosis risk can be given higher priority for treatment, while treatment for individuals with a lower fibrosis risk can be delayed, thereby alleviating them from the side effects and high cost of treatment); and 2) reducing the need for repeated liver biopsies for all patients.

[0432] Furthermore, the SNPs disclosed herein could be used in diagnostic kits to assess the increased or decreased risk of developing bridging fibrosis/cirrhosis and progression of fibrosis for patients with other liver diseases, such as hepatitis B, any co-infection with other viruses (such as HIV, etc.), non-alcoholic fatty liver diseases (NAFLD), drug-induced liver diseases, alcoholic liver diseases (ALD), primary biliary cirrhosis (PBC), primary sclerosing cholangitis (PSC), autoimmune hepatitis (AIH) and cryptogenic cirrhosis. Depending on the genotypes of one or multiple markers disclosed in any of Tables 11-12, alone or in combination with other risk factors, physicians could categorize these patients into slow, median, or rapid fibroses.

[0433] Table 11 provides results of statistical analyses for SNPs disclosed in Tables 1-4 (SNPs can be cross-referenced between tables based on their hCV identification numbers), and the association of these SNPs with mild or severe fibrosis stage. The statistical results shown in Table 11 provide support for the association of these SNPs with bridging fibrosis/cirrhosis. For example, the statistical results provided in Table 11 show that the association of these SNPs with is supported by p-values <0.05 in an allelic association test in the University of California (UCSF) and the Virginia Commonwealth University (VCU) sample sets in at least one of the following strata; all patients (A), Caucasian only (C), or other than Caucasian (0).

[0434] Table 11 presents statistical associations of SNPs with trial endpoint of S5, which is the comparison of Stage 0 (control group) vs. Stages 3 and 4 (case group), as described in the Examples. The definition of the various stages of Fibrosis/Cirrhosis can also be found in the Examples.

[0435] The column labeled “Marker” presents each SNP as identified by its unique identifier number. The hCV numbers are correlated in the Sequence Listing to their respective “rs” numbers that are publicly known. The column labeled “Allele” presents either the risk allele for each of the identified SNPs in the case of OR being larger than 1, or the non-risk allele in the case of OR being less than 1. In the latter case, the risk allele would be the complement of the non-risk allele in the SNP. In other words, the risk allele may also be presented in Tables 1-4 as the reverse complement of the allele presented in Table 11. The column labeled “Strata” indicates the group of individuals in which the association was observed. “A” indicates that the association was observed in all individuals, “C” indicates that the association was observed in Caucasians, “O” indicates the association was observed in other than Caucasians. The groups of columns labeled “UCSF” means the samples were obtained from the University of California, San Francisco. Among the 537 patients from UCSF, the samples had minimal or no fibrosis (stage 0, 25.9%), moderate or portal/periportal fibrosis (stages 1 and 2, 49%) or severe or bridging fibrosis/cirrhosis (stage 3-4, 25.1%). The groups of columns labeled “VCU” means the samples were obtained from the Virginia Commonwealth University. These samples were obtained from 483 patients that had minimal or no fibrosis (stage 0, 17.4%), moderate or portal/periportal fibrosis (stages 1 and 2, 34.2%) or severe or bridging fibrosis/cirrhosis (stage 3-4, 48.4%).

[0436] The column labeled “CT AF” gives the control allele frequency of that SNP in that stratum. The column labeled “CASE AF” gives the case allele frequency of that SNP in that stratum. The column labeled “OR/MHOR” indicates an approximation of the relative risk for an individual for the defined endpoint associated with the SNP. ORs less than 1 indicate the risk allele is protective for the defined endpoint, and ORs greater than 1 indicate the risk allele increases the risk of having the defined endpoint. “MHOR” refers to MH Odds Ratio, which indicates that the Cochran-Mantel-Haenszel test is used in the case of “ALL” stratum. The column labeled “pExact/MHp” indicates the results of 2-tail p-value analysis of allelic association generated by either the Fisher Exact test (in the case of the Caucasian stratum, or the Otherethn Stratum) or the Cochran-Mantel-Haenszel test (in the case of the All stratum) to determine if the qualitative phenotype is a function of the SNP genotype and is either a protective or risk allele in the UCSF sample set. The column labeled “p_{—}1tail” indicates the p-value generated by the Fisher Exact test or the Cochran-Mantel-Haenszel test to determine if the qualitative phenotype is a function of the SNP genotype in the VCU sample, and the OR is going in the same direction as the OR for that SNP in the UCSF sample. The column labeled “Genotypic combined UCSF+VCU” indicates the results of the genotypic analysis using UCSF as the discovery set, and VCU as the replication set, with the Major Allele (higher frequency of the two alleles) homozygote used as the reference genotype.

### Huang, et al.

TABLE 11
SNPs Association with Fibrosis/Cirrhosis

| | | | allelic: UCSF discovery (2-tail <= 0.05), VCU replication (1-tail <= 0.05) | | | | | | | | |
|---|---|---|---|---|---|---|---|---|---|---|---|
| | | | UCSF_STAGE_0_34 | | | | VCU_STAGE_0_34 | | | | |
| | | | | CASE | pExact/ | | | CASE | pExact/ | | |
| Marker | Allele | Strata | CT AF | AF | MHp | OR/MHOR | CT AF | AF | MHp | OR/MHOR | 1-tail |
| hCV11367838 | T | ALL | 61.4% | 58.3% | 0.418 | 0.868 | 62.5% | 54.9% | 0.120 | 0.746 | 0.060 |
| hCV11367838 | T | CAUCASIAN | 71.2% | 58.7% | 0.016 | 0.575 | 71.1% | 58.0% | 0.010 | 0.562 | 0.005 |
| hCV11367838 | T | OTHERETHN | 40.9% | 57.5% | 0.044 | 1.954 | 35.0% | 46.9% | 0.206 | 1.642 | 0.103 |
| hCV11722237 | T | ALL | 8.3% | 3.4% | 0.011 | 0.374 | 5.4% | 2.8% | 0.132 | 0.517 | 0.066 |
| hCV11722237 | T | CAUCASIAN | 12.0% | 3.8% | 0.006 | 0.291 | 6.3% | 3.3% | 0.187 | 0.505 | 0.093 |
| hCV11722237 | T | OTHERETHN | 1.1% | 2.4% | 0.602 | 2.275 | 2.5% | 1.5% | 0.555 | 0.609 | 0.722 |
| hCV1381377 | G | ALL | 79.3% | 72.2% | 0.044 | 0.665 | 78.6% | 72.0% | 0.126 | 0.717 | 0.063 |
| hCV1381377 | G | CAUCASIAN | 83.7% | 73.4% | 0.022 | 0.537 | 82.8% | 75.7% | 0.107 | 0.648 | 0.053 |
| hCV1381377 | G | OTHERETHN | 70.7% | 69.5% | 0.870 | 0.947 | 65.0% | 62.3% | 0.852 | 0.890 | 0.426 |
| hCV1721645 | G | ALL | 77.3% | 85.9% | 0.012 | 1.767 | 76.8% | 85.5% | 0.007 | 1.819 | 0.004 |
| hCV1721645 | G | CAUCASIAN | 80.1% | 90.4% | 0.005 | 2.345 | 76.6% | 88.2% | 0.003 | 2.281 | 0.002 |
| hCV1721645 | G | OTHERETHN | 71.7% | 75.6% | 0.608 | 1.221 | 77.5% | 78.5% | 1.000 | 1.058 | 0.500 |
| hCV25635059 | G | ALL | 93.5% | 97.8% | 0.013 | 3.032 | 91.5% | 95.7% | 0.045 | 2.054 | 0.022 |
| hCV25635059 | G | CAUCASIAN | 90.8% | 98.4% | 0.001 | 6.210 | 88.7% | 95.3% | 0.018 | 2.561 | 0.009 |
| hCV25635059 | G | OTHERETHN | 98.9% | 96.3% | 0.344 | 0.289 | 100.0% | 96.9% | 0.574 | 0.000 | 0.287 |
| hCV25647188 | G | ALL | 95.3% | 89.1% | 0.008 | 0.406 | 96.4% | 91.0% | 0.019 | 0.365 | 0.010 |
| hCV25647188 | G | CAUCASIAN | 95.2% | 85.9% | 0.002 | 0.309 | 96.1% | 89.3% | 0.026 | 0.341 | 0.013 |
| hCV25647188 | G | OTHERETHN | 95.7% | 96.3% | 1.000 | 1.197 | 97.5% | 95.4% | 1.000 | 0.530 | 0.500 |
| hCV3187664 | G | ALL | 78.1% | 85.0% | 0.036 | 1.597 | 81.0% | 83.8% | 0.383 | 1.224 | 0.192 |
| hCV3187664 | G | CAUCASIAN | 75.8% | 84.8% | 0.036 | 1.778 | 78.1% | 86.1% | 0.047 | 1.734 | 0.024 |
| hCV3187664 | G | OTHERETHN | 82.6% | 85.4% | 0.683 | 1.228 | 90.0% | 77.7% | 0.110 | 0.387 | 0.945 |

| | | | | | | | genotypic combined | |
|---|---|---|---|---|---|---|---|---|
| | | | allelic combined UCSF + VCU, 0.05 | | | | UCSF + VCU, | |
| | | | cutoff | | | | 0.05 cutoff | |
| | | | | CASE | pExact/ | | Major | |
| Marker | Allele | Strata | CT AF | AF | MHp | OR/MHOR | Homozygote | p-value |
| hCV11367838 | T | ALL | 61.8% | 56.2% | 0.052 | 0.786 | TT | 0.026 |
| hCV11367838 | T | CAUCASIAN | 71.2% | 58.3% | 0.000 | 0.566 | TT | 0.001 |
| hCV11367838 | T | OTHERETHN | 39.1% | 51.0% | 0.043 | 1.621 | TT | 0.046 |
| hCV11722237 | T | ALL | 7.2% | 3.0% | 0.001 | 0.393 | CC | 0.003 |
| hCV11722237 | T | CAUCASIAN | 9.6% | 3.4% | 0.000 | 0.336 | CC | 0.000 |
| hCV11722237 | T | OTHERETHN | 1.5% | 1.9% | 1.000 | 1.250 | CC | 1.000 |
| hCV1381377 | G | ALL | 79.1% | 72.1% | 0.006 | 0.676 | GG | 0.011 |
| hCV1381377 | G | CAUCASIAN | 83.3% | 74.9% | 0.004 | 0.597 | GG | 0.012 |
| hCV1381377 | G | OTHERETHN | 68.9% | 65.1% | 0.483 | 0.840 | GG | 0.531 |
| hCV1721645 | G | ALL | 77.1% | 85.6% | 0.000 | 1.766 | GG | 0.000 |
| hCV1721645 | G | CAUCASIAN | 78.7% | 89.0% | 0.000 | 2.189 | GG | 0.000 |
| hCV1721645 | G | OTHERETHN | 73.5% | 77.4% | 0.438 | 1.233 | GG | 0.072 |
| hCV25635059 | G | ALL | 92.7% | 96.5% | 0.004 | 2.159 | GG | 0.012 |
| hCV25635059 | G | CAUCASIAN | 89.9% | 96.4% | 0.000 | 2.975 | GG | 0.000 |
| hCV25635059 | G | OTHERETHN | 99.2% | 96.7% | 0.160 | 0.224 | GG | 0.155 |
| hCV25647188 | G | ALL | 95.7% | 90.3% | 0.001 | 0.417 | GG | 0.005 |
| hCV25647188 | G | CAUCASIAN | 95.5% | 88.1% | 0.000 | 0.346 | GG | 0.001 |
| hCV25647188 | G | OTHERETHN | 96.2% | 95.8% | 1.000 | 0.888 | GG | 0.341 |
| hCV3187664 | G | ALL | 79.1% | 84.2% | 0.028 | 1.400 | GG | 0.051 |
| hCV3187664 | G | CAUCASIAN | 76.8% | 85.6% | 0.001 | 1.805 | GG | 0.001 |
| hCV3187664 | G | OTHERETHN | 84.8% | 80.7% | 0.384 | 0.745 | GG | 0.626 |

Legend for Table 11:
Allele: the allele used to calculate allele frequencies
UCSF_STAGE_0_34: UCSF (discovery sample set)
UCSF_STAGE_0_34: VCU (replication sample set)
CT AF: control group allele frequency
CS AF: case group allele frequency
pExact/MHp: Fisher's exact p-value is used for the CAUCASIAN and OTHERETHN strata, the Cochran-Mantel-Haenszel p-value is used for the All strata
OR/MHOR: odds ratio, Cochran-Mantel-Haenszel odds ratio
Lower CI, Upper CI: 95% confidence interval limits around the odds ratio
2-tail: Same as pExact/MHp, see above.
1-tail: 1-tailed p-value
Major Homozygote: the genotype used as the reference in genotypic analyses

### Example Two

### Additional LD SNPs Associated with Fibrosis

[0438] Another investigation was conducted to identify SNP markers in linkage disequilibrium (LD) with SNPs which have been found to be associated with fibrosis as shown in Tables 1-4, and 11. The methodology is described earlier in the instant application. To summarize briefly, the power threshold (T) was set at an appropriate level such as 51%, or 70%, for detecting disease association using LD markers. This power threshold is based on equation (31) above, which incorporates allele frequency data from previous disease association studies, the predicted error rate for not detecting truly disease-associated markers, and a significance level of 0.05. Using this power calculation and the sample size, for each interrogated SNP a threshold level of LD, or r² value, was derived (r_{T}², equations (32) and (33)). The threshold value r_{T}² is the minimum value of linkage disequilibrium between the interrogated SNP and its LD SNPs possible such that the non-interrogated SNP still retains a power greater or equal to T for detecting disease-association.

[0439] Based on the above methodology, LD SNPs were found for the interrogated SNPs shown in Tables 1-4, and 11. Several sample LD SNPs for one interrogated SNP are listed in Table 12. Also shown are the public SNP IDs (rs numbers) for interrogated and LD SNPs, when available, and the threshold r² value and the power used to determine this, and the r² value of linkage disequilibrium between the interrogated SNP and its matching LD SNP. As an example in Table 12, the interrogated, fibrosis-associated SNP hCV25635059 was calculated to be in LD with hCV1716152 at a r² value of 0.65497, based on a 51% power calculation, thus making the latter a marker associated with fibrosis as well.

[0440] Table 12 provides a list of the LD SNPs that are related to and derived from an interrogated SNP. These LD SNPs are provided as an example of the groups of SNPs which can also serve as markers for disease association based on their being in LD with the interrogated SNP. The criteria and process of selecting such LD SNPs, including the calculation of the r² value and the r² threshold value, are described in this Example.

[0441] In Table 12, the column labeled “Interrogated SNP” presents each marker as identified by its unique identifier, the hCV number. The column labeled “Interrogated rs” presents the publicly known identifier rs number for the corresponding hCV number. The column labeled “LD SNP” presents the hCV numbers of the LD SNPs that are derived from their corresponding interrogated SNPs. The column labeled “LD SNP rs” presents the publicly known rs number for the corresponding hCV number. The column labeled “Power” presents the level of power where the r² threshold is set. For example, when power is set at 0.51, the threshold r² value calculated therefrom is the minimum r² that an LD SNP must have in reference to an interrogated SNP, in order for the LD SNP to be classified as a marker capable of being associated with a disease phenotype at greater than 51% probability. The column labeled “Threshold” presents the minimum value of r² that an LD SNP must meet in reference to an interrogated SNP in order to qualify as an LD SNP. The column labeled “r²” presents the actual r² value of the LD SNP in reference to the interrogated SNP to which it is related.

TABLE 12
LD SNPs

| Interrogated SNP | LD SNP | LD SNP rs | Power | THRESHOLD r_{T}² | r² |
|---|---|---|---|---|---|
| hCV25635059 | hCV1716152 | rs12546960 | 0.51 | 0.572674152 | 0.65497 |
| hCV25635059 | hCV1716155 | rs12546479 | 0.51 | 0.572674152 | 0.65497 |
| hCV25635059 | hCV228234 | rs12547652 | 0.51 | 0.572674152 | 0.65497 |
| hCV25635059 | hCV28037904 | rs4734066 | 0.51 | 0.572674152 | 0.58919 |

### Example Three

### Generating CRS Signature Marker Including Multiple SNPs

[0442] To further understand the SNP markers described above, another approach was undertaken to investigate and discover a multivariate signature marker set comprising more than one SNP. Said signature marker set, also known as Cirrhosis Risk Score (CRS), can be used to evaluate and determine an altered risk of fibrosis development in a patient in a clinical setting.

[0443] I. Sample Description

[0444] A total of 1,468 patients with well documented chronic HCV were prospectively recruited from the Hepatology clinics at five centers, over a 30 consecutive month period. Patients were either new referrals for evaluation and/or treatment of chronic HCV or existing patients being monitored on an ongoing basis. The enrollment criteria were the same as previously described. In brief, all patients were adults (ages 18-75 years), anti-HCV and HCV RNA positive, and had a baseline liver biopsy prior to receiving any treatment for HCV. Patients were excluded if they had any other chronic liver diseases, co-infection with human immunodeficiency virus or hepatitis B virus, or presence of hepatocellular carcinoma. The patients or subjects in the training set or training cohort (N=1,020) were from the University of California San Francisco (UCSF, N=537) and the Virginia Commonwealth University Medical Center (VCU, N=483). The patients or subjects in the test set or validation cohort (N=448) were from Stanford University (Stanford, N=100), University of Illinois (UIC, N=115), and Sutter Health (Sutter, N=233). The study was approved by the institutional review boards of all centers and written informed consent was obtained from all subjects.

[0445] For this study, S5 (Stage 0 vs. Stage 3/4) was used as the endpoint. For this endpoint, there are 420 patients in the training set, and 154 in the test set. For this approach, Caucasian patients were used in building the signature, and detailed clinical data can be found in Table 13. All patients from the sample set met the inclusion/exclusion criteria in study protocol (see Table 14). All subjects had signed informed, written consent and the study protocol was IRB approved.

TABLE 13
Summary of clinic data

| | Training Set | Test Set |
|---|---|---|
| | (UCSF + VCU) | (Stanford + UIC + Sutter) |
| Caucasian #: | 708 | 276 |
| Age_Bx | | |
| mean +/− SD | 48.6 +/− 8.1 | 47.9 +/− 7.4 |
| Gender (M/F) | | |
| % Male | 71.2% | 64.5% |
| Fibrosis score* | | |
| mean +/− SD | 1.8 +/− 1.4 | 2.4 +/− 1.3 |
| 0 | 157 (22.2) | 14 (5.1) |
| 1 | 98 (13.8) | 64 (23.2) |
| 1.5 | 108 (15.3) | 26 (9.4) |
| 2 | 82 (11.6) | 32 (11.6) |
| 3 | 132 (18.6) | 54 (19.6) |
| 4 | 131 (18.5) | 86 (31.2) |
| 3 + 4 | 263 (37.1) | 140 (50.8) |
| Age at infection | | |
| Mean | 24.0 +/− 8.5 | 21.7 +/− 7.6 |
| Median | 22 | 21 |
| Daily alcohol | | |
| >50 g/day | 31.9% | 35.5% |
| Duration of infection | | |
| Mean duration | 24.8 +/− 8.1 | 25.9 +/− 7.6 |
| Patients with duration | 72.5% | 79.0% |
| Fibrosis rate | | |
| mean +/− SD | 0.08 +/− 0.37 | 0.11 +/− 0.12 |

TABLE 14
Sample enrollment: inclusion/exclusion criteria

Inclusion Criteria
Adults (Age 18 ~ 75).
Evidence of active HCV infection as shown by a positive anti-HCV antibody and detectable
HCV —RNA in serum.
Patient should be treatment naïve at the time of liver biopsy or clinical evidence of cirrhosis
All patients should sign informed consent for genetic study
Exclusion Criteria
Evidence of co-infection with HBV and/or HIV
Evidence of hepatocelluar carcinoma
Evidence of another co-existing etiology of chronic liver disease (e.g. Wilson's disease,
hemochromatosis, autoimmune hepatitis).
Clinical information: information should include, but not limited to, the following:
Demographics
Date of birth
Height
Weight
Sex
Ethnicity
Risk factors for infection
IV drug
Blood transfusion
history of jaundice that was attributable to HCV
Year of infection (estimated)
Alcohol data
Daily and lifetime alcohol consumption
CAGE score
Liver biopsy
Fibrosis stage
Inflammation grade
Steatosis grade
Lab test results (dated within 1 year to Bx except for HCV genotype)
ALT
AST
Bilirubin
Albumin
Platelets
HCV genotype and viral load
Other medical history, including major medical conditions such as diabetes, metabolic
syndrome (hyperlipidemia, hypertension), alcoholic liver disease.

[0446] II. Methods Used in Developing the Cirrhosis Risk Score

[0447] Three main steps are involved in the development of the Cirrhosis Risk Score, also known as the Fibrosis Genetic Risk Score. They are:

[0448] Marker Selection

[0449] Building the Classifier

[0450] Cross Validation

[0451] All the above steps were carried out using the training set and once the final model is chosen, the model was validated using an independent test set.

[0452] The performance of the model on both the training and test set was measured in terms of Area under the ROC curve (AUC). A brief description of AUC is provided below.

### Marker Selection:

[0453] Marker selection is a critical step in developing the Cirrhosis Risk Score model. Typically in genotypic analysis, there are a large number of biomarkers available for testing on a small number of patients. This leads to the problem of overfitting. See Witten and Frank, “Data Mining: Practical Machine Learning Tools and Techniques”, 2nd Ed., Elsevier, 2005, and Trevor Hastie, Robert Tibshirani, and Jerome Friedman. The Elements of Statistical Learning: Data Mining, Inference, and Prediction. Springer-Verlag, New York, N.Y., 2001.

[0454] Overfitting refers to the model fitting the training data very well but inability to generalize well to data it has not seen. Such a situation can be inferred from how large the difference is between the training and test AUC. Marker selection can help alleviate some of this problem. Also, the classifier algorithm may be sensitive to irrelevant or redundant markers. Marker selection helps with this problem as well by eliminating such markers. Overall, marker selection improves the generalizability of the model and increases its interpretability.

[0455] Consistency metric is used to evaluate subsets of markers. In this approach, the marker set that is able to strongly discriminate between the two classes (cases and controls) is chosen. See the following references for more discussions on consistency metric. Witten and Frank, “Data Mining: Practical Machine Learning Tools and Techniques”, 2nd Ed., Elsevier, 2005, M. Dash and H. Liu, “Consistency-based Search in Feature Selection”, Artificial Intelligence 151, 2003, p 155-276, Liu, H., and Setiono, R., (1996). A probabilistic approach to feature selection—A filter solution. In 13th International Conference on Machine Learning (ICML '96), July 1996, pp. 319-327. Bari, Italy.

[0456] If two patients have the marker values matched for each marker across the marker subset except for their class labels (case or control), then they will be considered inconsistent. Such an analysis is carried out across the entire dataset to obtain a consistency score.

[0457] Since the number of subsets to be evaluated grows exponentially large as the number of markers increases, a heuristic search is adopted. The search method chosen is called Best First (I. Witten and E. Frank, “Data Mining: Practical Machine Learning Tools and Techniques”, 2nd Ed., Elsevier, 2005) and a forward selection strategy is used. In this approach, the subset is grown by sequentially adding markers that increase the consistency score. To avoid being trapped in a local optimum, algorithm has the capability to backtrack to the previous step and evaluate different search path. A stopping criterion is used to stop the search if after a finite number of steps no improvement is possible.

[0458] Before the markers are evaluated using the consistency measure, entropy-based Univariate prefiltering of the markers is carried out to eliminate markers that have little information about the endpoint. See Fayyad, U. M., and Irani K. B. 1993. Multi-interval discretization of continuous-valued attributes for classification learning, Proceedings of the 13th Int. Joint Conference on Artificial Intelligence, 1022-1027. Morgan Kaufmann.

### Building Classifier

[0459] Using the selected markers, a classification algorithm (classifier) was implemented. The classification algorithm used in this study was Naïve Bayes (see Witten and E. Frank), a simple but effective method suited for sparse (i.e., few samples) high dimensional (i.e., large number of markers) data. In this approach, the probability of a patient having a disease (or not) given their genetic composition (which is assumed to be represented by the genetic markers used in the test) is roughly approximated by the product of individual class conditional probabilities for the genetic markers. The class conditional probability of a marker for a patient is simply the proportion of patients who have the specific genotype for that marker among those who have the disease (or not) in the training dataset.

[0460] More precisely, given a set of outcomes C={case, control} and a set of predictive markers X={X₁, X₂, . . . , Xₙ}, the probability of a patient S={X₁=x₁, X₂=x₂, . . . , Xₙ=xₙ} having the disease is approximately given by

Pr(case|S)∝Pr(case)×Pr(X₁=x₁|case)×Pr(X₂=x₂|case)× . . . ×Pr(Xₙ=xₙ|case)

Similarly, one can obtain the probability for a patient to not have the disease.

### Cross-Validation

[0461] Cross-validation procedure was used to increase the robustness of the markers selected. In a 10 fold cross-validation experiment (CV), used in this example, each of the 10 folds 9/10^{th} of the training set was used for model building. Patients were sampled without replacement from the training set in each fold. Markers were selected using the feature selection procedure described above. The 10-fold CV experiment was repeated 50 times and for each marker the number of folds it was selected in was recorded.

[0462] Markers available for selection were reduced sequentially starting with the full marker set, followed by markers that have made at least 10% of the fold all the way to the maximum percentage of folds any marker has made. The feature selection and classification procedures were applied at each step to the retained markers. In this approach the number of markers available for selection was iteratively reduced while enriching the remaining marker pool with highly robust markers. The full training set was used in this sequential procedure and the training AUC (Area under the ROC curve) and a measure called Robustness is recorded. (Model) Robustness was simply obtained by averaging the number of folds over the number of markers in the model at each threshold level. Robustness ≧0.5 indicates a highly robust model as it implies that on an average the markers in the model would be selected in 50% or more of the CV folds.

[0463] Training AUC, Model Robustness and 1/(Number of markers) were plotted as a function of CV fold frequency threshold in FIG. 1: Final Signature Selection. In FIG. 1, N denotes the number of markers in the selected model at each threshold value. Signature selected by sequentially reducing the number of markers available for marker selection while increasing the robustness of the markers.

[0464] The points in the x-axis in FIG. 1 are

[0465] 1—Full Marker Set (1044 binary markers)

[0466] 2—Markers selected while keeping all markers in the training set

[0467] 3—Markers retained made at least 10% of the CV folds

[0468] 4—Markers retained made at least 20% of the CV folds

[0469] 5—Markers retained made at least 30% of the CV folds

[0470] 6—Markers retained made at least 40% of the CV folds

[0471] 7—Markers retained made at least 50% of the CV folds

[0472] 8—Markers retained made at least 60% of the CV folds

[0473] 9—Markers retained made at least 80% of the CV folds

[0474] It can be seen from the figure above, the crossover region (pts 6, 7) provides the best tradeoff between training performance and robustness. CRS-6 and CRS-7 signature marker sets correspond to those two points. In selecting the final signature(s) it was observed that as the robustness of the model increases, model fits better i.e., overfitting is reduced and more likely it will generalize better. In other words, the model's test performance (test AUC) would increase. However, in the selection procedure implemented increase in model robustness is also accompanied by a reduction in the number of markers in the model. This will eventually lead to an underfitting of the model. The CRS signatures provide the best tradeoff between the increase in robustness and the loss of robust markers. For more detailed description on this procedure, reference is made to Venkatesh, et al., “Robust Model Selection Using Cross Validation: A Simple Iterative Technique for Developing Robust Gene Signatures in Biomedical Genomics Applications”, ICMLA, pp. 193-198, 5th International Conference on Machine Learning and Applications (ICMLA '06), 2006. Such a sequential enrichment of the initial set of markers considered for marker selection and model building leads to a robust final model that has a greater chance of being generalized or in other words be widely applicable. The test results support this conclusion.

### Area Under the ROC Curve

[0475] The diagnostic value used in this study is the Area under the ROC curve. See Witten and Frank, et al. Receiver Operating Characteristics (ROC) curve is generated by plotting the true positive rate (sensitivity) against false positive rate (1-specificity) by varying the probability threshold used for determining who gets to be classified as case or control.

[0476] The Area under the ROC curve is a robust measure of classifier performance as it allows one to evaluate globally how well the classifier does. The Area under the ROC curve is 0.5 for a classifier that does no better than chance. As the area under the ROC curve increases so does the performance of the classifier, and hence the signature marker set.

[0477] AUC can be regarded as the probability that a randomly selected diseased subject will be ranked higher than that of a randomly selected non-diseased subject.

[0478] Results

[0479] By utilizing the methodology described above, a Cirrhosis Risk Score signature marker set consisting of seven SNP was obtained. Of the seven SNPs, different combinations of the markers were investigated using the methods described above, including two marker combination, three marker combination, four maker combination, five marker combination, six marker combination, and all seven marker combination. Results of the different CRS signature marker sets are shown in Table 15 and Table 16.

[0480] The results indicated that all combinations of the signature set were valid and useful markers in indicating fibrosis development risk. Among them, CRS-7 (7 SNPs) has the higher AUC score, and was the preferred signature set. Note, however, the CRS-2 (2 SNPs) can also be an effective signature set, having an AUC score of 0.63 in the test set. The same is true for CRS-3 (3 SNPs), CRS-4 (4 SNPs), CRS-5 (5 SNPs), and CRS-6 (6 SNPs). An example of CRS-2 signature for fibrosis/cirrhosis is the combination of hCV25635059 and hCV11722237, the latter being also known by its public ID number as rs4986791.

[0481] Having arrived at a signature market set, a further goal was to provide tools to facilitate clinicians to improve the management of the HCV patient care. It is well known that conventional risk factors such as gender, alcohol assumption, and age, have not been shown as good predictors for fibrosis. In addition, no correlation was found between fibrosis risk and HCV viral load or mode of infection. The discovery of the signature marker set enables doctors to evaluate a patient's likelihood of developing severe fibrosis at a much higher odds ratio than using just conventional risk factors. For example, using only traditional clinical risk factors, the odds ratio of identify patients at risk for cirrhosis was about 2.0. However, using the CRS-7 signature marker set, the odds ratio (OR) increased to 5.8. In addition, combining the CRS-7 with traditional clinical risk factors, the odds ratio jumped to 8.3 at the optimal AUC cutoff. FIG. 6 shows a comparison chart of the three different approaches, demonstrating the effectiveness of the CRS-7 signature marker set. Further details regarding the composition of the CRS-7 signature marker set are shown in Table 17, including the names of the genes where they can be found.

[0482] The more reliable and effective test of CRS-7 signature marker set can potentially reduce painful and costly liver biopsy, and identify early stage patients with high risk of developing severe fibrosis and cirrhosis which could respond to drug treatment well. Other CRS signature marker set such as CRS-6, CRS-5, CRS-4, CRS-3, or CRS-2 can also be used similarly in predicting levels of risks for HCV patients.

TABLE 15
Validation of CRS-7, CRS-6 and CRS-2.

| | TRAIN | | | TEST | | |
|---|---|---|---|---|---|---|
| | AUC | 95% CI | p-value | AUC | 95% CI | p-value |
| CRS-7 | 0.75 | 0.7-0.8 | ~0 | 0.73 | 0.56-0.89 | 0.0035 |
| CRS-6 | 0.73 | 0.68-0.78 | ~0 | 0.75 | 0.6-0.89 | 0.0005 |
| CRS-3 | 0.66 | 0.61-0.71 | ~0 | 0.71 | 0.57-0.85 | 0.0018 |
| (hCV25635059 + | | | | | | |
| hCV11722237 + | | | | | | |
| hCV11367838) | | | | | | |
| CRS-2 | 0.62 | 0.57-0.66 | ~0 | 0.63 | 0.48-0.78 | 0.05 |
| (hCV25635059 + | | | | | | |
| hCV11722237) | | | | | | |
| hCV25635059 | 0.57 | 0.53-0.6 | 0.0001 | 0.62 | 0.49-0.74 | 0.03 |
| hCV11722237 | 0.56 | 0.53-0.6 | 0.0003 | 0.52 | 0.4-0.64 | 0.3585 |
| hCV11367838 | 0.59 | 0.54-0.63 | 0.0003 | 0.65 | 0.51-0.79 | 0.0175 |
| hCV1381377 | 0.57 | 0.52-0.62 | 0.0015 | 0.6 | 0.46-0.74 | 0.0757 |
| hCV1721645 | 0.59 | 0.54-0.63 | 0.0001 | 0.51 | 0.38-0.64 | 0.4565 |
| hCV25647188 | 0.56 | 0.53-0.6 | 0.0001 | 0.6 | 0.56-0.63 | ~0 |
| hCV3187664 | 0.58 | 0.54-0.63 | 0.0002 | 0.59 | 0.44-0.73 | 0.1174 |

TABLE 16
The identity of the CRS-7 and the CRS-6 signature market set

| CRS-7 | CRS-6 |
|---|---|
| hCV25635059 | hCV25635059 |
| hCV11722237 | hCV11722237 |
| hCV11367838 | hCV11367838 |
| hCV1381377 | hCV1381377 |
| hCV1721645 | hCV1721645 |
| hCV25647188 | hCV25647188 |
| hCV3187664 | |

TABLE 17
CRS-7 signature marker set: SNPS and Genes

| | Public SNP | | | | | | | |
|---|---|---|---|---|---|---|---|---|
| CDx SNP ID | ID | Chr | SNP Type | Cauc | AA | Chin | Japan | Gene |
| hCV25635059 | | 8 | Nonsense | 7.5% | 2.4% | 0.0% | 0.0% | AZIN1 |
| hCV11722237 | rs4986791 | 9 | Missense | 4.4% | 1.6% | 3.8% | 4.3% | TLR4 |
| hCV11367838 | rs886277 | 11 | Missense | 39.3% | 57.1% | 69.6% | 76.4% | TRPM5 |
| hCV1381377 | rs2290351 | 15 | Missense | 21.7% | 33.9% | 57.0% | 62.6% | none |
| hCV1721645 | rs4290029 | 1 | Missense | 15.1% | 24.8% | 44.4% | 39.9% | none |
| hCV25647188 | rs17740066 | 3 | Missense | 10.6% | 3.1% | 5.7% | 1.3% | none |
| hCV3187664* | rs2878771 | 12 | TFBS | 17.0% | 16.5% | 16.2% | 17.9% | AQP2 |

*is absent in CRS6

### Example Four

### CRS Signature Generation and Application

[0483] Below is another example demonstrating the generation of a CRS signature marker comprising multiple SNPs, and other clinical factors. The example also shows the application of the CRS signature maker in scoring a patient based upon his genetic makeup, so as to use the score to evaluate and determine an altered risk of fibrosis development in the patient.

[0484] In this example, efforts were undertaken to confirm significant SNPs which are associated with fibrosis from a genomic scan, and 361 SNPs were selected for signature building. Next, using a machine-learning approach on the Training cohort (N=708), a signature was built consisting of the 7 SNPs highly predictive of cirrhosis risk (I. Witten and E. Frank, “Data Mining: Practical Machine Learning Tools and Techniques”, 2nd Ed., Elsevier, 2005). Then, using a simple Naïve Bayes algorithm, a ‘Cirrhosis-Risk-Score (CRS)’ was computed based on these 7 SNPs to assess the risk for cirrhosis in each patient (I. Witten and E. Frank, “Data Mining: Practical Machine Learning Tools and Techniques”, 2nd Ed., Elsevier, 2005). Finally, the performance of CRS was tested in an independent Validation cohort (N=276).

[0485] The aim of this study was to build and validate a CRS signature, when used alone or combined with standard clinical factors that could be utilized in clinical practice to assess the risk for cirrhosis in chronic hepatitis C (CHC) patients. This genetic test could optimize the current clinical management and treatment of CHC patients.

### I. Patients: Training and Validation

[0486] A total of 1,468 patients with well-documented CHC were prospectively recruited over a 30 consecutive month period from the Liver clinics at five centers. Subjects in the Training cohort (N=708 Caucasians, 1,020 all races) were from the University of California at San Francisco (UCSF) and the Virginia Commonwealth University (VCU). Since the previous report, an additional 104 patients were enrolled from USCF and included in the analysis. Subjects in the Validation cohort (N=276 Caucasians, 488 all races) were enrolled from Stanford University (Stanford), California Pacific Medical Center (CPMC), and University of Illinois at Chicago (UIC). The enrollment criteria were the same as described earlier in the present invention. In brief, all patients were adults (ages 18-75 years), anti-HCV and HCV RNA positive, and had a baseline liver biopsy prior to, if any, treatment for HCV. Patients were excluded if they had any other co-existing chronic liver diseases such as co-infection with human-immunodeficiency-virus (HIV) or hepatitis B virus (HBV), or presence of hepatocellular carcinoma (HCC). The study was approved by the institutional review boards of all participating centers and written informed consent was obtained from all subjects.

[0487] All participants completed a questionnaire to record their risk factors (and year) for HCV infection (injection drug use [IDU], blood transfusion [BT] and others), and to assess lifetime alcohol consumption. Medical records were reviewed regarding demographics (date of birth, gender and ethnicity), virological features (HCV genotype and serum HCV RNA level), and liver histology. Liver biopsies were scored by local experienced pathologists using the system described by Knodell et al. (VCU) or its modification by Batts-Ludwig (UCSF, Stanford, UIC, CPMC) (Brunt E M. Grading and staging the histopathological lesions of chronic hepatitis: the Knodell histology activity index and beyond. Hepatology 2000; 31:241-6). Only those patients with biopsies that were considered by the pathologists or hepatologists as adequately sized were included in the study. Lifetime and daily alcohol consumption were calculated based on a previously validated questionnaire (Skinner H A, Sheu W J. Reliability of alcohol use indices. The Lifetime Drinking History and the MAST. J Stud Alcohol. 1982; 43:1157-70). Year of infection was defined as the earlier time point of the first exposure to IDU or BT prior to 1992, as used in other studies (Poynard T, Bedossa P, Opolon P. Natural history of liver fibrosis progression in patients with chronic hepatitis C. The OBSVIRC, METAVIR, CLINIVIR, and DOSVIRC groups. Lancet 1997; 349: 825-32; Wright M, Goldin R, Fabre A, et al. Measurement and determinants of the natural history of liver fibrosis in hepatitis C virus infection: a cross sectional and longitudinal study. Gut. 2003; 52:574-9; Monto A, Patel K, Bostrom A, et al. Risks of a range of alcohol intake on hepatitis C-related fibrosis. Hepatology 2004; 39:826-34).

[0488] Estimated duration of infection was calculated from the year of infection to the year of liver biopsy. When the duration of infection could be estimated, a fibrosis rate was calculated as fibrosis stage divided by duration of infection. To calculate progression rate on VCU patients, stage as measured by Knodell score was converted into METAVIR units (similar to Batts-Ludwig score) as described in previous studies (Poynard T, Bedossa P, Opolon P. Natural history of liver fibrosis progression in patients with chronic hepatitis C. The OBSVIRC, METAVIR, CLINIVIR, and DOSVIRC groups. Lancet 1997; 349: 825-32; Bedossa P, for the French METAVIR Coorporative Group. Inter- and intra-observer variation in the assessment of liver biopsy of chronic hepatitis C. Hepatology 1994; 20:15-20).

[0489] The primary objective was to determine the risk of developing bridging fibrosis/cirrhosis in Caucasian CHC patients. Due to the natural history of progression, patients with either Bridging-fibrosis or Cirrhosis (stage 3-4) are considered as at a ‘high-risk’ of developing cirrhosis, and were defined as ‘Cases’. Patients with No-fibrosis (stage 0) are considered as at a low-risk′ and were defined as ‘Controls’. Patients with Portal/Periportal fibrosis were excluded from signature building to the uncertainty of their risk. Using this endpoint, 420 patients from the Training and 154 patients from the Validation cohort were included in the signature building.

II. Genotyping Whole blood was collected from each subject in EDTA tubes. DNA extraction and genotyping reaction was performed as described previously (Huang H, Shiffman M L, Cheung R C, et al. Identification of two gene variants associated with risk of advanced fibrosis in patients with chronic hepatitis C. Gastroenterology 2006; 130:1679-87). DNAs from both the UCSF and VCU cohort were pooled into the following groups: No fibrosis (stage 0), Portal/Periportal fibrosis (stage 1 or 2 in UCSF, stage 1 in VCU), and Bridging fibrosis/Cirrhosis (stages 3 or 4). A gene-centric, genome-wide scan consisting of 24,823 putative functional SNPs was performed on the UCSF cohort. Of all the SNPs with significant association in UCSF cohort, the first batch of 100 was genotyped in individual VCU DNAs as described previously. All the remaining SNPs were genotyped in pooled VCU DNAs in this study. ‘Replicated SNPs’ were defined as those SNPs with significant association in both the UCSF and VCU cohorts, with odds ratios (ORs) in the same direction and of similar magnitude, based on either pool or individual data.

[0490] A total of 361 unique SNPs based on several clinical endpoints were selected for building the signature and individually genotyped in all sample sets. They can be divided into 7 categories: 1) 142 replicated SNPs associated with bridging fibrosis/cirrhosis when compared with no fibrosis (Stage 3-4 vs. 0); 2) 159 (94 additional) replicated SNPs associated with bridging fibrosis/cirrhosis when compared with no to portal/periportal fibrosis (Stage 3-4 vs. 0-2 in UCSF; 3-4 vs. 0-1 in VCU), including the previously reported SNPs in DDX5, CPT1A and POLG2 (Huang et al, see above); 3) 88 (21 additional) replicated SNPs associated with portal/periportal fibrosis to cirrhosis when compared with no/minimal fibrosis (Stage 2-4 vs. 0-1 in UCSF, 1-4 vs. 0 in VCU); 4) 66 (12 additional) replicated SNPs associated with any fibrosis when compared with no fibrosis (stage 1-4 vs. 0); 5) 228 (26 additional) replicated SNPs in fibrosis trend analysis (stage 0 vs. 1-2 vs. 3-4 in UCSF; 0 vs. 1 vs. 3-4 in VCU); 6) 25 SNPs genotyped for the fine density mapping of DDX5, CPT1A and MTP but did not fall into the previous five categories; 7) 41 SNPs individually genotyped in all sample sets for DNA quality control. For the primary endpoints (category 1 and 2), all replicated SNPs significant in Caucasian subjects were included in analysis Huang H, Shiffman M L, Cheung R C, et al. Identification of two gene variants associated with risk of advanced fibrosis in patients with chronic hepatitis C. Gastroenterology 2006; 130:1679-87. For those replicated SNPs based on the other endpoints (category 3-5) or significant only when analyzed in all races, the coverage ranged from 50% to 100%.

### III. CRS Signature

[0491] Three major steps were involved in building the CRS signature: ranking markers, selecting the final signature and building the CRS algorithm, and validating the CRS (FIG. 2A). The first two steps were carried out in the Training set; once the final signature was selected, it was then tested in the Validation set.

[0492] As the first step, markers were ranked in their order of robustness by performing marker selection using a repeated 10-fold-cross-validation (10×CV) experiment (FIG. 2B). Before each 10×CV-experiment, the training set was randomized and a stratified sampling was used to create the 10 CV folds to ensure that, in each fold, the proportion of cases and controls was the same as in the original training set. In each of the 10×CV-experiments, 9-folds of training samples were used. Each SNP was transformed into 3 binary markers according to the three genotypes. An entropy-based univariate analysis was used to remove those SNPs poorly associated with cirrhosis risk (Fayyad, U. M. and Irani K. B. Multi-interval discretization of continuous-valued attributes for classification learning, Proceedings of the 13th Int. Joint Conference on Artificial Intelligence, 1993; 1022-1027). Next, a subset of the remaining markers, which strongly discriminated high-risk vs. low-risk for cirrhosis was selected, using Consistency-based-Subset-Evaluator (I. Witten and E. Frank, “Data Mining: Practical Machine Learning Tools and Techniques”, 2nd Ed., Elsevier, 2005; M. Dash and H. Liu. Consistency-based Search in Feature Selection. Artificial Intelligence 2003; 151:155-276; Liu, H. and Setiono, R. A probabilistic approach to feature selection—A filter solution. In 13th International Conference on Machine Learning (ICML '96). 1996; 319-327), combined with Best First (a heuristic search) and a forward selection strategy (I. Witten and E. Frank, “Data Mining: Practical Machine Learning Tools and Techniques”, 2nd Ed., Elsevier, 2005). In this approach, the subset of markers was selected by sequentially adding markers that could increase the consistency score, a parameter to measure the performance (I. Witten and E. Frank, “Data Mining: Practical Machine Learning Tools and Techniques”, 2nd Ed., Elsevier, 2005; M. Dash and H. Liu. Consistency-based Search in Feature Selection. Artificial Intelligence 2003; 151:155-276; Liu, H. and Setiono, R. A probabilistic approach to feature selection—A filter solution. In 13th International Conference on Machine Learning (ICML '96). 1996; 319-327). A stopping criterion was used to terminate the search if after a finite number of steps no improvement was possible. Fifty runs of such 10×CV-experiments were performed and 500 subsets of markers were obtained. The markers were ranked based on the # folds (number of times) they were selected into the 500 sets. For each marker, ‘% CV-folds’ was defined as their selected # of folds divided by 500.

[0493] The second step of selecting the final signature was an iterative process (FIG. 2A: inset of “Select Signature”). Nine lists of markers were created based on their % CV-folds being above or equal to these cutoffs: 0% (full marker set), 0.2% (selected once in 500 runs), 10%, 20%, 30%, 40%, 50%, 60%, 80%, respectively. For each list, the ‘marker selection’ process was re-applied and a corresponding signature was generated. For each of the nine signatures generated except the first one, a Naïve Bayes classification algorithm (see Calculation of the Cirrhosis Risk Score below for details) was implemented to classify samples in the Training set (I. Witten and E. Frank, “Data Mining: Practical Machine Learning Tools and Techniques”, 2nd Ed., Elsevier, 2005). Two parameters, AUC and ‘Robustness’, were calculated and plotted with each other for each signature. AUC was used to assess overall performance of each signature; Robustness was used to assess overall robustness of each signature, calculated as the average % CV-folds of all markers in each signature. The final signature was determined graphically by picking the point close to where the two curves intersected, which provides the best tradeoff between the increase in model robustness and the loss of robust markers (see FIG. 1) as described in Example Three.

[0494] Marker selection and classification were performed using standard software tools, and the ROC curve and the AUC were computed using the Mayo Clinic's ROC program (DeLong, DeLong, and Clarke-Pearson. Compared the Areas Under Two or More Correlated Receiver Operating Characteristic Curves: A Nonparametric Approach. Biometrics 1998; 44:837-845).

### IV. CRS Algorithm

[0495] The value of CRS based on a constellation of the 7 SNPs described in the previous examples was estimated using a Naïve Bayes formula⁸ I. Witten and E. Frank, “Data Mining: Practical Machine Learning Tools and Techniques”, 2nd Ed., Elsevier, 2005. Given outcomes C={cirrhosis, no cirrhosis} and a set of seven predictive SNPs X={X₁, X₂, . . . X₇}, the probability of a patient S={X₁=x₁, X₂=x₂, . . . , Xₙ=x₇} having cirrhosis is computed as follows:

$$C R S = \frac{0.626 * P ( S \vert cirrhosis )}{0.626 * P ( S \vert cirrhosis ) + 0.374 * P ( S \vert no Cirrhosis )}$$

The conditional probabilities P (SI cirrhosis) and P (SI no cirrhosis), were estimated assuming each SNP was independent of all other SNPs.

P(S|cirrhosis)=P(X₁=x₁|cirrhosis)×P(X₂=x₂|cirrhosis)× . . . ×P(X₇=x₇|cirrhosis)

P(S|no cirrhosis)=P(X₁=x₁|no cirrhosis)×P(X₂=x₂|no cirrhosis)× . . . ×P(X₇=x₇|no cirrhosis)

The probabilities P(Xᵢ=xᵢ|cirrhosis), P(Xᵢ=xᵢ|no cirrhosis) are the class conditional probabilities for the i^{th} marker Xᵢ with value xᵢ (each SNP can take the value of ‘1’ or ‘0’ based on the genotypes), given that the patient has cirrhosis or no cirrhosis respectively.

[0496] The Cirrhosis Risk Score (CRS) based on a constellation of seven SNPs only or seven SNP & Gender is computed in two steps. First, a probability score is estimated using a Naïve Bayes formula. Next, if the estimated probability is greater than a (predetermined) high cutoff probability then the patient is classified as High-Risk (HR), if it is less than the low cutoff probability, the patient is classified as Low-Risk (LR).

### Step 1: Calculate a Probability Score:

[0497] Naïve Bayes Formula

[0498] Given outcomes C={cirrhosis, no cirrhosis} and a set of seven predictive markers plus Gender X={X₁, X₂, . . . , X₈}, the probability of a patient S={X₁=X₁, X₂=X₂, . . . Xₙ=X₈} having cirrhosis is computed as follows:

$$P ( cirrhosis \vert S ) = \frac{P ( cirrhosis ) * P ( S \vert cirrhosis )}{\begin{matrix}P ( cirrhosis ) * P ( S \vert cirrhosis ) + \\ P ( no cirrhosis ) * P ( S \vert no cirrhosis )\end{matrix}} \qquad ( Equation 34 )$$

P (cirrhosis) and P (no cirrhosis) are the prior probabilities and are simply the percent of patients with and without high risk for cirrhosis in the training set, respectively. In this case:
[0499] P (cirrhosis)=0.625592422
[0500] P (no cirrhosis)=0.374407583

[0501] In the Naive Bayes formula, the conditional probabilities P (SI cirrhosis) and P (S|no cirrhosis), also called likelihood functions, are estimated assuming each SNP is independent of all other SNPs. The 8^{th} marker is the Gender assay and is optional.

P(S|cirrhosis)=P(X₁=x₁|cirrhosis)×P(X₂=x₂|cirrhosis)× . . . ×P(X₈=x₈|cirrhosis) (Equation 35)

P(S|no cirrhosis)=P(X₁=x₁|no cirrhosis)×P(X₂=x₂|no cirrhosis)× . . . ×P(X₈=x₈|no cirrhosis) (Equation 36)

[0502] The probabilities P(Xᵢ=xᵢ|cirrhosis), P(Xᵢ=xᵢ|no cirrhosis) in Equations 35 and 36. 2 and 3 are the class conditional probabilities for the i^{th} marker Xᵢ with value xᵢ, given that the patient has cirrhosis or no cirrhosis respectively.

[0503] In Table 18, P(Xᵢ=xᵢ|cirrhosis), P(Xᵢ=xᵢ|no cirrhosis) for the 7 SNPs and Gender are provided. Each SNP can take the value of ‘1’ or ‘0’ based on the genotypes.

TABLE 18
Naïve Bayes Parameters for CRS

| | | SNP value | | P (SNP = 1\| | P (SNP = 0\| | P (SNP = 1\| | P (SNP = 0\| |
|---|---|---|---|---|---|---|---|
| Marker | Gene | =1 | =0 | cirrhosis) | cirrhosis) | no cirrhosis) | no cirrhosis) |
| SNP1 | AZIN1 (Chr8) | GG | GA, AA | 0.928030303 | 0.071969697 | 0.801282051 | 0.198717949 |
| SNP2 | TLR4 (Chr9) | CC | CT, TT | 0.928301887 | 0.071698113 | 0.810126582 | 0.189873418 |
| SNP3 | TRPM5 (Chr11) | TT | TC, CC | 0.318181818 | 0.681818182 | 0.487341772 | 0.512658228 |
| SNP4 | none (Chr15) | GG | GA, AA | 0.554716981 | 0.445283019 | 0.696202532 | 0.303797468 |
| SNP5 | none (Chr1) | GG | GC, CC | 0.784905660 | 0.215094340 | 0.610062893 | 0.389937107 |
| SNP6 | none (Chr3) | GG | GA, AA | 0.784905660 | 0.215094340 | 0.905660377 | 0.094339623 |
| SNP7 | AQP2 (Chr12) | GG | GC, CC | 0.747169811 | 0.252830189 | 0.578616352 | 0.421383648 |
| SNP8 (Gender) | | Male | Female | 0.750943396 | 0.249056604 | 0.610062893 | 0.389937107 |

[0504] If the value for any of the 7 SNPs is missing, CRS is undetermined.

[0505] If the Gender value is missing, CRS can be calculated based on 7 SNPs only, all Naïve Bayes parameters would remain the same.

### Step 2: Assign Risk

[0506] Once the probability is computed, it is compared with a P_{cutoff}.

[0507] 1) If P>P_{high cutoff} then the patient is classified as High Risk (HR)

[0508] 2) If P<P_{low cutoff} then the patient is classified as Low Risk (LR)

[0509] 3) If P_{low cutoff}<P<P_{high cutoff} then the patients is classified as undetermined.

[0510] A low-cutoff value of 0.48, and a high-cutoff value of 0.73 are recommended.

[0511] As an example, assume that there is a patient who is a Female and has the following genotypes for the 7 SNPs, as indicated in Table 19.

TABLE 19
Example for CRS Score Calculation

| SNP | SNP value |
|---|---|
| SNP1 = GG | 1 |
| SNP2 = CC | 1 |
| SNP3 = TC | 0 |
| SNP4 = GA | 0 |
| SNP5 = GG | 1 |
| SNP6 = AA | 0 |
| SNP7 = GG | 1 |
| SNP8 = Female | 0 |

[0512] The probability of this patient having cirrhosis is calculated by first using Equations 35 and 36 and Table 18.

P(cirrhosis)*P(S|cirrhosis)=0.625592422×(0.9280303×0.9283031887×0.681818182×0.445283019×0.78490566×0.21509434×0.747169811×0.249056604)=0.005140571

P(no cirrhosis)*P(S|no cirrhosis)=0.374407583×(0.801282051×0.810126582×0.512658228×0.303797468×0.610062893×0.094339623×0.578616352×0.389937107)=0.000491529

[0513] Using Eq. 1, we have,

P(cirrhosis|S)=0.005140571/(0.005140571+0.000491529)=0.913

[0514] Since P (cirrhosis|S)>0.73, the risk category for this patient is HR.

[0515] In the following table, Table 20, additional examples are provided. Each symbol in the input string represents the SNP value for the specific SNP. For example, ‘0’ in the beginning of the string would represent a value ‘0’ for SNP1 (Genotype is GA or AA). The order of the markers is as in Table 18. Here, the term “indet” is short for indeterminable, which means the patient is neither an LR, nor, an HR.

TABLE 20
Additional Examples in Calculating CRS

| | P (cirrhosis) * | P (no cirrhosis) * | | |
|---|---|---|---|---|
| Input | P (S \|cirrhosis) | P (S \|no cirrhosis) | P (cirrhosis\|S) | Risk |
| 00000000 | 0.000002855 | 0.000013299 | 0.177 | LR |
| 10000000 | 0.000036817 | 0.000053625 | 0.407 | LR |
| 11000000 | 0.000476686 | 0.000228800 | 0.676 | Indet |
| 11100000 | 0.000222454 | 0.000217501 | 0.506 | Indet |
| 11110000 | 0.000277124 | 0.000498440 | 0.357 | LR |
| 11111000 | 0.001011261 | 0.000779818 | 0.565 | Indet |
| 11111100 | 0.003690214 | 0.007486251 | 0.330 | LR |
| 11111110 | 0.010905410 | 0.010279628 | 0.515 | Indet |
| 11111111 | 0.032881463 | 0.016082644 | 0.672 | Indet |

V. Results To minimize population stratification in different races, this study focused on Caucasians, who comprised over 70% of the enrolled subjects (Cardon L R, Palmer L J. Population stratification and spurious allelic association. Lancet 2003; 361:598-604). It was previously reported the strategy of using two large cohorts enrolled from UCSF and VCU to identify replicated SNPs associated with fibrosis risk (Huang H, Shiffman M L, Cheung R C, et al. Identification of two gene variants associated with risk of advanced fibrosis in patients with chronic hepatitis C. Gastroenterology 2006; 130:1679-87). Here in the signature building process, samples from UCSF and VCU were combined as the Training cohort (N=708). The Validation cohort (N=276) was enrolled from 3 independent centers. The clinical risk factors, such as the mean age, sex distribution, percent of patients with daily alcohol consumption over 50 g, age at infection over 40 and duration of infection did not differ significantly between the two cohorts (Table 21). The average fibrosis score and the percentage of patients with bridging fibrosis or cirrhosis were higher in the validation cohort. For the subset of patients with a defined high-risk or low-risk and involved in the signature building (N=420 in Training, N=154 in Validation), similar characteristics were obtained.

TABLE 21
Patient Characteristics

| | Training | Validation | |
|---|---|---|---|
| | (UCSF + VCU) | (Stanford + CPMC + | |
| | N = 708 | UIC) N = 276 | P Value |
| Age_Bx | | | |
| mean +/− SD | 48.6 +/− 8.1 | 47.9 +/− 7.4 | 0.262 |
| Sex | | | |
| % Male | 71.2% | 64.5% | 0.041 |
| Daily alcohol | | | |
| % >50 g/day | 31.9% | 35.5% | 0.282 |
| All: mean +/− SD | 51.9 +/− 76.2 | 66.4 +/− 102.9 | 0.016 |
| Age at infection | | | |
| % >=40 | 4.4% | 1.8% | 0.062 |
| mean +/− SD | 24.2 +/− 8.2 | 21.7 +/− 7.6 | |
| Duration of infection | | | |
| Mean duration | 24.8 +/− 8.1 | 25.9 +/− 7.6 | 0.086 |
| Fibrosis score | | | |
| mean +/− SD | 1.8 +/− 1.4 | 2.4 +/− 1.3 | <.001 |
| No fibrosis | 157 (22.2) | 14 (5.1) | |
| Portal/Periportal fibrosis | 288 (40.7) | 122 (44.2) | |
| Bridging fibrosis/Cirrhosis | 263 (37.1) | 140 (50.8) | |
| Fibrosis rate | | | |
| mean +/− SD | 0.09 +/− 0.17 | 0.11 +/− 0.12 | 0.166 |

[0516] The CRS signature consisting of 7 SNPs was derived from the list of markers with % CV-fold over the cutoff of 40%, which was close to the intersection of the Training AUC and Robustness plots. Of the 500 subsets of markers generated from 50 runs of 10×CV-experiment, the % CV-fold for the 7 SNPs ranged from 40.2% to 83.8%, indicating they were highly robust in their predictability. Table 22A lists the 7 SNPs based on their % CV-folds from high to low. Of the 7 SNPs, SNP1 was not in public database (its Celera ID number is hCV25635059, and its sequence can be found in the Sequence Listing under the corresponding hCV number), and SNPs 2-7 have public identifications. Four SNPs were located in known genes; 3 were located in chromosomal regions not fully characterized. All 7 SNPs were highly significant in their associations with risk for cirrhosis, with odds ratios (ORs) ranging from 0.36 to 3.23. AUC of each SNP was below 0.60, indicating their moderate predictability when used individually. The risk genotypes of these 7 SNPs had medium to high frequencies (18.5%-87.3%) in Caucasian CHC patients, indicating that a combination could lead to even higher risk yet still be applicable to a large proportion of patients (Table 22A).

### Table 22: Panel of 7 SNPS and Cirrhosis Risk Score Algorithm

22A: Characteristics of 7 SNPs in the Training Cohort

| | | | | | | | | Frequency |
|---|---|---|---|---|---|---|---|---|
| | | | Robustness | Risk | P value^{a} | | | (Caucasian |
| SNP Marker | Public ID | Gene (Chr) | (% CV-fold) | Genotype | (Univariate) | ORs (95% CI) | AUC (95% CI) | Patients) |
| hCV25635059 | | AZIN1 | 419 (83.8%) | GG | 0.0002 | 3.23 (1.76-6.11) | 0.57 (0.53-0.60) | 86.9% |
| | | (Chr8) | | | | | | |
| hCV11722237 | rs4986791 | TLR4 (Chr9) | 410 (82.0%) | CC | 0.0004 | 3.11 (1.66-5.81) | 0.56 (0.53-0.60) | 87.3% |
| hCV11367838 | rs886277 | TRPM5 | 325 (65.0%) | CT, CC | 0.0006 | 2.05 (1.36-3.08) | 0.59 (0.54-0.63) | 63.6% |
| | | (Chr11) | | | | | | |
| hCV1381377 | rs2290351 | none (Chr15) | 242 (48.4%) | AG, AA | 0.0038 | 1.86 (1.22-2.82) | 0.57 (0.53-0.62) | 41.6% |
| hCV1721645 | rs4290029 | none (Chr1) | 229 (45.8%) | GG | 0.0001 | 2.35 (1.52-3.63) | 0.59 (0.54-0.63) | 72.3% |
| hCV25647188 | rs17740066 | none (Chr3) | 228 (45.6%) | AG, AA | 0.0014 | 2.76 (1.48-5.15) | 0.56 (0.53-0.60) | 18.5% |
| hCV3187664 | rs2878771 | AQP2 | 201 (40.2%) | GG | 0.0003 | 2.17 (1.42-3.30) | 0.58 (0.54-0.63) | 66.7% |
| | | (Chr12) | | | | | | |
| Sex | | | | Male | 0.0024 | 1.94 (1.26-2.96) | 0.56 (0.42-0.70) | 69.3% |
| Age | | | | Older | 0.0097 | N/A | 0.57 (0.39-0.75) | N/A |
| Alcohol | | | | >=50 g/ | 0.5871 | 1.13 (0.73-1.74) | 0.58 (0.46-0.70) | 32.9% |
| | | | | day | | | | |

^{a}Cases were defined as High-Risk patients who had Bridging-fibrosis or Cirrhosis (stage 3-4), and Controls were defined as Low-Risk patients who had No-fibrosis (stage 0).

$$22 B \text{:} Cirrhosis Risk Score Algorithm$$

$$C R S = \frac{0.626 * P ( S \vert cirrhosis )}{0.626 * P ( S \vert cirrhosis ) + 0.374 * P ( S \vert no Cirrhosis )}$$

$$P ( S \vert cirrhosis ) = P ( {X}_{1} = {x}_{1} \vert cirrhosis ) \times P ( {X}_{2} = {x}_{2} \vert cirrhosis ) x … x P ( {X}_{7} = {x}_{7} \vert cirrhosis )$$

$$P ( S \vert no cirrhosis ) = P ( {X}_{1} = {x}_{1} \vert no cirrhosis ) \times P ( {X}_{2} = {x}_{2} \vert no cirrhosis ) x … x P ( {X}_{7} = {x}_{7} \vert no cirrhosis )$$

The probabilities P(Xᵢ=xᵢ|cirrhosis), P(Xᵢ=xᵢ|no cirrhosis) in CRS Eq. 1 and CRS Eq. 2 are the class conditional probabilities for the i^{th} marker Xᵢ with value xᵢ (each SNP can take the value of ‘1’ or ‘0’ based on the genotypes), given that the patient has cirrhosis or no cirrhosis respectively.

| | | | | SNP value | | P (SNP = 0\| | P (SNP = 1\| | P (SNP = 0\| | P (SNP = 1\| |
|---|---|---|---|---|---|---|---|---|---|
| SNP | Gene | Celera ID | Public ID | =1 | =0 | no cirrhosis) | no cirrhosis) | cirrhosis) | cirrhosis) |
| SNP1 | AZIN1 (Chr8) | hCV25635059 | | GG | GA, AA | 0.198717949 | 0.801282051 | 0.071969697 | 0.928030303 |
| SNP2 | TLR4 (Chr9) | hCV11722237 | rs4986791 | CC | CT, TT | 0.189873418 | 0.810126582 | 0.071698113 | 0.928301887 |
| SNP3 | TRPM5 (Chr11) | hCV11367838 | rs886277 | TT | TC, CC | 0.512658228 | 0.487341772 | 0.681818182 | 0.318181818 |
| SNP4 | none (Chr15) | hCV1381377 | rs2290351 | GG | GA, AA | 0.303797468 | 0.696202532 | 0.445283019 | 0.554716981 |
| SNP5 | none (Chr1) | hCV1721645 | rs4290029 | GG | GC, CC | 0.389937107 | 0.610062893 | 0.215094340 | 0.784905660 |
| SNP6 | none (Chr3) | hCV25647188 | rs17740066 | GG | GA, AA | 0.094339623 | 0.905660377 | 0.215094340 | 0.784905660 |
| SNP7 | AQP2 (Chr12) | hCV3187664 | rs2878771 | GG | GC, CC | 0.421383648 | 0.578616352 | 0.252830189 | 0.747169811 |
| SNP8 | AMEL(ChrXY) | | | Male | Female | 0.389937107 | 0.610062893 | 0.249056604 | 0.750943396 |

[0518] CRS was calculated based on the genotypes of 7 SNPs in each patient, hence reflecting the combined impact of all 7 SNPs (Table 22B). The value of CRS ranged from 0 to 1, representing the probability from 0 to 100% of the risk for cirrhosis. Therefore, the higher the CRS value, the higher is the risk. In the Training set, the AUC of CRS was 0.75 (95% CI: 0.70-0.80, p<0.001) for predicting the risk of developing cirrhosis (FIG. 3A). Importantly, similar performance was observed in the Validation set, where the AUC of CRS was 0.73 (95% CI: 0.56-0.89, p<0.001). In contrast, AUC of clinical risk factors (age, gender and daily alcohol) for predicting the risk for cirrhosis was only 0.53 (95% CI: 0.35-0.72, p=0.36). Combining CRS and clinical risk factors resulted in an AUC of 0.76 (95% CI: 0.60-0.92, p<0.001), a value very close to that obtained from CRS alone (FIG. 3B). Consistently, when each clinical risk factor was added separately into the CRS, the AUC did not improve significantly in either Training or Validation sets. The performance of the CRS improved marginally by 1.6%-3.6% when combined with all 3 clinical risk factors (FIG. 3C). Taken together, the results clearly indicated that the CRS was a much better predictor of cirrhosis risk than clinical risk factors.

[0519] The role of alcohol consumption in fibrosis risk has been controversial. Patients in our study cohorts had a wide range of alcohol consumption with >30% consumed >50 g daily (Table 21), a cutoff previously reported to be associated with the increased risk of fibrosis progression (Wright M, Goldin R, Fabre A, et al. Measurement and determinants of the natural history of liver fibrosis in hepatitis C virus infection: a cross sectional and longitudinal study. Gut. 2003; 52:574-9). In our data sets, alcohol was not significantly associated with the risk of developing cirrhosis in the univariate analysis, and was a poor predictor by the AUC test (FIG. 3C). To further investigate whether CRS was dependent on alcohol consumption, comparisons were made for the performance of CRS in patients with different degrees of alcohol consumption such as 0, 25, 50 and 80 g/day. FIG. 3D demonstrated that CRS retained consistently good predictability for cirrhosis risk regardless of the degree of alcohol consumption. Although it was possible that patients might over report alcohol consumption, especially in those with excessive alcohol use (>80 g/day), nevertheless, the results indicated that the performance of CRS was independent of alcohol consumption.

[0520] Table 23A shows the predictive values for CRS at a few selected cutoffs in the Training set. A low-cutoff value of <0.48 to identify low-risk patients would misclassify only 9.9% (26 of 263) of high-risk patients. Of the 94 patients with CRS <0.48, 68 low-risk patients were correctly identified (NPV=72%). A high-cutoff value of >0.73 to identify high-risk patients would misclassify 20.4% (32 of 157) of low-risk patients. Of the 177 patients with CRS >0.73, 145 high-risk patients were correctly identified (PPV=81.9%). Accordingly, 149 (35.5%) of the patients fell between the 0.48 and 0.73 hence could not be classified accurately. A lower high-cutoff of >0.62 would increase the misclassifying rate to 32.5%, but decrease the unclassifiable group to 20.9%. On the other hand, a higher high-cutoff of >0.78 would misclassify only 8.9% patients but would increase the unclassifiable group to 59.3%.

[0521] Here, the term “NPV” stands for “Negative Predictive Value”, and the term “PPV” stands for “Positive Predictive Value”. The positive predictive value of a test is the probability that the patient has the disease when restricted to those patients who test positive. One can compute the positive predictive value as PPV=TP/(TP+FP), where TP and FP are the number of true positive and false positive results, respectively. Notice that the denominator for positive predictive value is the number of patients who test positive. Positive predictive value can also be defined using conditional probabilities, PPV=P [Patient has the disease|Test is positive].

[0522] The negative predictive value of a test is the probability that the patient will not have the disease when restricted to all patients who test negative. One can compute the negative predictive value as NPV=TN/(TN+FN), where TN and FN are the number of true negative and false negative results, respectively. Notice that the denominator for negative predictive value is the number of patients who test negative. Negative predictive value can also be defined using conditional probabilities, NPV=P [Patient is healthy|Test is negative].

[0523] Similar values of misclassifying rate, sensitivity and specificity were observed when applying the same cutoffs in an independent Validation cohort (Table 23B). Using a low-cutoff of <0.48 to identify low-risk patients, 10.7% (15 of 154) of high-risk patients would have been misclassified. Due to the high prevalence of high-risk patients in the Validation cohort (90.9%), NPV was only 28.6% in the low-risk group. On the other hand, using a high-cutoff of >0.73 to confirm high-risk had a PPV of 95.7%, with 21.4% of low-risk patients being misclassified. Changing the high-cutoff from >0.73 to >0.62 would misclassify 35.7% of the low-risk patients but decrease the unclassifiable group from 40.9% to 24.1%.

### Table 23: Predictive Values of CRS

23A. Training Cohort

| | | Low-Risk | High-Risk | | | | | |
|---|---|---|---|---|---|---|---|---|
| | | (Stage 0) | (Stage 3-4) | | | | | Misclassifying |
| CRS | All Patients | (N = 157) | (N = 263) | NPV | PPV | Sensitivity | Specificity | Rate^{a} |
| <0.20 | 18 (4.3%) | 16 | 2 | 88.9% | | 99.2% | 10.2% | 0.8% |
| <0.30 | 30 (7.1%) | 27 | 3 | 90.0% | | 98.9% | 17.2% | 1.1% |
| <0.40 | 55 (13.1%) | 46 | 9 | 83.6% | | 96.6% | 29.3% | 3.4% |
| <0.48 | 94 (22.4%) | 68 | 26 | 72.3% | | 90.1% | 43.3% | 9.9% |
| >0.62^{b} | 242 (57.6%) | 51 | 191 | | 78.9% | 72.6% | 67.5% | 32.5% |
| >0.73^{c} | 177 (42.1%) | 32 | 145 | | 81.9% | 55.1% | 79.6% | 20.4% |
| >0.78 | 77 (18.3%) | 14 | 63 | | 81.8% | 24.0% | 91.1% | 8.9% |
| >0.80 | 67 (16.0%) | 11 | 56 | | 83.6% | 21.3% | 93.0% | 7.0% |

23B. Validation Cohort

| | | Low-Risk | High-Risk | | | | | |
|---|---|---|---|---|---|---|---|---|
| | | (Stage 0) | (Stage 3-4) | | | | | Misclassifying |
| CRS | All Patients | (N = 14) | (N = 140) | NPV | PPV | Sensitivity | Specificity | Rate |
| <0.20 | 5 (3.2%) | 3 | 2 | 60.0% | | 98.6% | 21.4% | 1.4% |
| <0.30 | 14 (9.1%) | 6 | 8 | 42.9% | | 94.3% | 42.9% | 5.7% |
| <0.40 | 16 (10.4%) | 6 | 10 | 37.5% | | 92.9% | 42.9% | 7.1% |
| <0.48 | 21 (13.6%) | 6 | 15 | 28.6% | | 89.3% | 42.9% | 10.7% |
| >0.62^{b} | 96 (62.3%) | 5 | 91 | | 94.8% | 65.0% | 64.3% | 35.7% |
| >0.73^{c} | 70 (45.5%) | 3 | 67 | | 95.7% | 47.9% | 78.6% | 21.4% |
| >0.78 | 33 (21.4%) | 1 | 32 | | 97.0% | 22.9% | 92.9% | 7.1% |
| >0.80 | 31 (20.1%) | 1 | 30 | | 96.8% | 21.4% | 92.9% | 7.1% |

[0525] a. Lower misclassifying rate was used for the low cutoff than high cutoff due to the higher risk of misclassifying high risk subjects into low risk category than vice versa

[0526] b. Using 0.48 and 0.62, 20% and 24.1% patients were unclassifiable in Training and Validation cohort, respectively.

[0527] c. Using 0.48 and 0.73, 35.5% and 40.9% patients were unclassifiable in Training and Validation cohort, respectively.

[0528] In addition to the risk for cirrhosis, the utility of the CRS was evaluated in predicting two other relevant clinical endpoints: absolute risk for cirrhosis and fibrosis rate. All Caucasian patients in the Training and Validation cohorts (including those with Portal/Periportal-fibrosis) were included in the analyses. Patients were divided into 10 subgroups based on their CRS value, and the average value of absolute risk for cirrhosis and fibrosis rate was calculated for each group. There was an excellent correlation between CRS and absolute risk for cirrhosis (R²=0.9548), as well as between CRS and fibrosis rate (R²=0.9144) (FIG. 4). The results indicate that CRS could also be a continuous predictor for the absolute risk and fibrosis rate in CHC patients.

[0529] According to the National-Institutes-of-Health (NIH) consensus statement, “treatment is recommended for patients with an increase risk of developing cirrhosis”. The lack of a prognostic test to identify patients with a high-risk for cirrhosis has meant that treatment candidates are identified as those on “a liver biopsy with portal or bridging fibrosis, and at least moderate inflammation and necrosis” (National Institutes of Health Consensus Development Conference Statement: Management of hepatitis C: 2002-June 10-12. Hepatology 2002; 36:S3-20). While this approach will identify those with significant disease, it does not indicate the likelihood of developing cirrhosis in those patients with less severe histology.

[0530] The CRS described herein permits one to measure the cirrhosis risk rather than using findings of the liver biopsy to project the future course of disease. The CRS may be used to stratify patients' cirrhosis risk prior to liver biopsy (FIG. 5). Patients with high-risk should be treated regardless of their fibrosis stage since they are at increased risk of developing cirrhosis. The remaining patients with low or unclassifiable risk could then undergo liver biopsy and those with stage 2-4 would also be treated (FIG. 5). Among those with stage 0-1 fibrosis on liver biopsy, treatment could definitely be deferred if they are low-risk, and individualized in those with unclassifiable risk. While being consistent with the current NIH consensus in which all patients with significant disease are treated immediately (stage 2-4), such a strategy would markedly improve current management in two aspects. First, liver biopsy could be avoided in high-risk patients. In our study population (N=984), 41.5% (N=408) of patients could be classified as high-risk for cirrhosis (with PPV of 81.9% to 95.7%) at a high-cutoff of >0.73. Second, those patients with fibrosis stage 0-1 and a high-risk for cirrhosis, whose treatment is currently deferred, might benefit from treatment as their response to antiviral therapy would be better (Zeuzem S, Feinman S V, Rasenack J, et al. Peginterferon Alfa-2a in Patients with Chronic Hepatitis C. N Engl J Med. 2000; 343:1666-1672; Manns M P, McHutchison J G, Gordon S C, et al. Peginterferon alfa-2b plus ribavirin compared with interferon alfa-2b plus ribavirin for initial treatment of chronic hepatitis C: a randomised trial. Lancet 2001; 358:958-65). Among the 408 high-risk patients in our study population, 100 (24.5%) had fibrosis stage 0-1.

[0531] In addition, CRS could also be used to aid re-treatment decisions in those non-responders to previous treatment. Using a conservative low-cutoff of CRS <0.48 would misclassify only 9.9% of high-risk patients. If such patients also had a low fibrosis stage, treatment could be safely deferred while antiviral drugs with fewer side effects and better efficacy are developed. Furthermore, the current practice guidelines also recommend performing periodic liver biopsy in untreated patients with mild disease to assess disease progression (National Institutes of Health Consensus Development Conference Statement: Management of hepatitis C: 2002 June 10-12. Hepatology 2002; 36:S3-20; Strader D B, Wright W, Thomas D L, Seeff L B. AASLD Practice Guideline: Diagnosis, management, and treatment of hepatitis C. Hepatology 2004; 39:1147-71). The CRS could be used to refine the optimal interval between liver biopsies.

[0532] The data herein demonstrate that the CRS is a much better predictor for cirrhosis risk than the standard clinical risk factors; the performance of the CRS was only marginally improved when combined with clinical factors (FIGS. 3B and 3C). Moreover, when used in clinical practice, the CRS test is non-invasive, with all components measurable, objective, and not subject to sampling or interpretation error. In contrast, clinical factors, such as alcohol consumption, are subjective and suffer from recall bias and inaccuracy.

[0533] In the signature building process, robustness was accomplished by ranking markers by their % CV-folds in the repeated cross-validation experiments. The high signal-to-noise ratio was achieved by employing univariate filtering, feature selection and Best-First-search. It is also important to emphasize that the entire signature building process, including selecting source SNPs, ranking SNPs, and building the final signature, was performed strictly within the Training cohort. The Validation cohort was only used to validate the final signature once it was built. In addition, unlike many studies which divide the same sample pool into Training and Validation, the Validation set in this study was enrolled from 3 independent sites. As expected, there were differences in the clinical parameters between Training and Validation cohorts, such as average fibrosis stage (1.8 vs. 2.4), and case/control ratio (263/157 vs. 140/14). Despite these, excellent performance was achieved in the Validation set, and its AUC was nearly identical to that developed in the Training (0.73 vs. 0.75). Taken together, the CRS results would be applicable to other independent sample sets, and the signature building approach described here can be generalized to build predictive signatures in other diseases.

[0534] Unlike rare Mendelian diseases, the genetic risk of common, complex diseases such as fibrosis associated with CHC are likely polygenic. Indeed, even though each of the 7 most predictive markers provided reliable predictability (Table 22A), the constellation of the 7 SNPs was even more robust and predictive. This finding is consistent with the multiple biological pathways known to be involved in the hepatic fibrogenesis (Friedman S L. Molecular regulation of hepatic fibrosis, an integrated cellular response to tissue injury. J Biol Chem. 2000; 275:2247-50). Of the 7 genes, antizyme-Inhibitor-1 (AZIN1) and toll-like-receptor-4 (TLR4) have an identified role in hepatic fibrosis. AZIN1 binds to ornithine decarboxylase (ODC) antizyme and stabilizes ODC, thus inhibiting antizyme-mediated ODC degradation (Murakami Y, Matsufuji S, Hayashi S, Tanahashi N, Tanaka K. Degradation of ornithine decarboxylase by the 26S proteasome. Biochem Biophys Res Commun. 2000; 267:1-6). ODC activity in non-cancerous hepatic tissue from CHC patients correlates with the severity of active hepatitis and degree of fibrosis (MacIntosh E, Gauthier T, Pettigrew N, Minuk G. Liver regeneration and the effect of exogenous putrescine on regenerative activity after partial hepatectomy in cirrhotic rats. Hepatology. 1992; 16:1428-33). In addition, ODC mRNA was elevated in liver tissue with HCC (Gan F Y, Gesell M S, Moshier J A, Alousi M, Luk G D. Detection of ornithine decarboxylase messenger RNA in human hepatocellular carcinoma by in situ hybridization. Epithelial Cell Biol. 1992; 1(1):13-7). Regarding TLR4, it is expressed in all hepatic cell types in response to its ligand lipopolysaccharide (LPS) (Schwabe R F, Seki E, Brenner D A. Toll-like receptor signaling in the liver. Gastroenterology. 2006; 130(6):1886-900). In CHC patients, NS5A induces the elevated expression of TLR4 in B cells by 3- to 7-fold (Machida K, Cheng K T, Sung V M, Levine A M, Foung S, Lai M M. Hepatitis C virus induces toll-like receptor 4 expression, leading to enhanced production of beta interferon and interleukin-6. J Virol. 2006; 80(2):866-74). Moreover, LPS-TLR4 pathway plays an important role in the hepatic fibrogenesis (Seki E, Osawa Y, Uchinami H, Brenner D A, Schwabe R F. TLR4 mediates inflammation and fibrogenesis after bile duct ligation. Hapatology 2005; 42: A265).

[0535] In conclusion, it has been demonstrated in the present invention that a CRS signature containing 2-7 predictive SNPs can identify CHC patients with a high-risk for cirrhosis. Relying on cutoff values such as <0.48 and >0.73, distinction could be made between the absence and presence of high cirrhosis risk with sufficient reliability. Application of CRS in clinical practice could help to avoid liver biopsy in approximately 41.5% of the CHC patients, identify additional treatment candidates at early disease stage, assist re-treatment decisions and optimize disease monitoring. In addition, CRS would complement the current and evolving non-invasive fibrosis staging tests such as aspartate aminotransferase/platelet ratio (APRI), Fibrotest and Fibroscan, by adding the much-needed dimension of risk assessment to the management of CHC (Wai C T, Greenson J K, Fontana R J, et al. A simple noninvasive index can predict both significant fibrosis and cirrhosis in patients with chronic hepatitis C. Hepatology. 2003; 38:518-26; Castera L, Vergniol J, Foucher J, et al. Prospective comparison of transient elastography, Fibrotest, APRI, and liver biopsy for the assessment of fibrosis in chronic hepatitis C. Gastroenterology. 2005; 128:343-50).

[0536] All publications and patents cited in this specification are herein incorporated by reference in their entirety. Various modifications and variations of the described compositions, methods and systems of the invention will be apparent to those skilled in the art without departing from the scope and spirit of the invention. Although the invention has been described in connection with specific preferred embodiments and certain working examples, it should be understood that the invention as claimed should not be unduly limited to such specific embodiments. Indeed, various modifications of the above-described modes for carrying out the invention that are obvious to those skilled in the field of molecular biology, genetics and related fields are intended to be within the scope of the following claims.

| | |
|---|---|
| Gene Number: | 1 |
| Celera Gene: | hCG16438 - 102000094651924 |
| Celera Transcript: | hCT2276358 - 102000094651953 |
| Public Transcript Accession: | |
| Celera Protein: | hCP1805640 - 197000064938281 |
| Public Protein Accession: | |
| Gene Symbol: | TRPM5 |
| Protein Name: | transient receptor potential cation channel, subfamily M, member 5 |
| Celera Genomic Axis: | GA_x5YUV32W6LE (2030302 . . . 2068841) |
| Chromosome: | 11 |
| OMIM NUMBER: | 604600 |
| OMIM Information: | |
| Transcript Sequence (SEQ ID NO: 1): | |
| Protein Sequence (SEQ ID NO: 16): | |
| SNP Information | |
| Context (SEQ ID NO: 31): | |
| | CTGAGGCTGGAGAAGCACATCTCGGAGCAGAGGGCGGGCTACGGGGGCACTGGCAGCATCGAGATCCCTGTCCTCTGCTTGCTGGTCAATGGTGATCCCA |
| | R |
| | CACCTTGGAGAGGATCTCCAGGGCCGTGGAGCAGGCTGCCCCGTGGCTGATCCTGGCAGGCTCGGGGGGCATCGCCGATGTGCTTGCTGCCCTAGTGAAC |
| Celera SNP ID: | hCV11367838 |
| Public SNP ID: | rs886277 |
| SNP in Transcript Sequence | SEQ ID NO: 1 |
| SNP Position Transcript: | 713 |
| SNP Source: | Applera |
| Population (Allele, Count): | caucasian (G, 6\|A, 6) african american (G, 13\|A, 7) total (G, 19\|A, 13) |
| SNP Type: | Missense Mutation |
| Protein Coding: | SEQ ID NO: 16, at position 235, (N, AAC) (S, AGC) |
| SNP Source: | dbSNP; HapMap; HGBASE |
| Population (Allele, Count): | caucasian (A, 82\|G, 38) |
| SNP Type: | Missense Mutation |
| Protein Coding: | SEQ ID NO: 16, at position 235, (N, AAC) (S, AGC) |
| Gene Number: | 1 |
| Celera Gene: | hCG16438 - 102000094651924 |
| Celera Transcript: | hCT7476 - 102000094651925 |
| Public Transcript Accession: | |
| Celera Protein: | hCP35880 - 197000064938280 |
| Public Protein Accession: | |
| Gene Symbol: | TRPM5 |
| Protein Name: | transient receptor potential cation channel, subfamily M, member 5 |
| Celera Genomic Axis: | GA_x5YUV32W6LE (2030302 . . . 2068841) |
| Chromosome: | 11 |
| OMIM NUMBER: | 604600 |
| OMIM Information: | |
| Transcript Sequence (SEQ ID NO: 2): | |
| Protein Sequence (SEQ ID NO: 17): | |
| SNP Information | |
| Context (SEQ ID NO: 32): | |
| | CTGAGGCTGGAGAAGCACATCTCGGAGCAGAGGGCGGGCTACGGGGGCACTGGCAGCATCGAGATCCCTGTCCTCTGCTTGCTGGTCAATGGTGATCCCA |
| | R |
| | CACCTTGGAGAGGATCTCCAGGGCCGTGGAGCAGGCTGCCCCGTGGCTGATCCTGGCAGGCTCGGGGGGCATCGCCGATGTGCTTGCTGCCCTAGTGAAC |
| Celera SNP ID: | hCV11367838 |
| Public SNP ID: | rs886277 |
| SNP in Transcript Sequence | SEQ ID NO: 2 |
| SNP Position Transcript: | 713 |
| SNP Source: | Applera |
| Population (Allele, Count): | caucasian (G, 6\|A, 6) african american (G, 13\|A, 7) total (G, 19\|A, 13) |
| SNP Type: | Missense Mutation |
| Protein Coding: | SEQ ID NO: 17, at position 235, (N, AAC) (S, AGC) |
| SNP Source: | dbSNP; HapMap; HGBASE |
| Population (Allele, Count): | caucasian (A, 82\|G, 38) |
| SNP Type: | Missense Mutation |
| Protein Coding: | SEQ ID NO: 17, at position 235, (N, AAC) (S, AGC) |
| Gene Number: | 2 |
| Celera Gene: | hCG1651441 - 68000102011292 |
| Celera Transcript: | hCT1651568 - 68000102011293 |
| Public Transcript Accession: | |
| Celera Protein: | hCP1640547 - 197000069364492 |
| Public Protein Accession: | |
| Gene Symbol: | |
| Protein Name: | |
| Celera Genomic Axis: | GA_x5YUV32W6GH (5259618 . . . 5281313) |
| Chromosome: | 15 |
| OMIM NUMBER: | |
| OMIM Information: | |
| Transcript Sequence (SEQ ID NO: 3): | |
| Protein Sequence (SEQ ID NO: 18): | |
| SNP Information | |
| Context (SEQ ID NO: 33): | |
| | CGCCAGAAAAGACACCAGGGGAGCAAGGCTCAAACCAGGGGCAGCTAAATCTGATCTTGTGGACCAGTCTCTAGTAAGGGCTTTCAGCGTGGCTGTCTGT |
| | Y |
| | CATTGCTTTCCAAATAGGATGCAGCAATGATTGGTACATGGGTATTAAGATCGGTAGTAGGGGCTAGTCCAAGTTTAGCAATAGCCAAACTGGAGAGCCT |
| Celera SNP ID: | hCV1381377 |
| Public SNP ID: | rs2290351 |
| SNP in Transcript Sequence | SEQ ID NO: 3 |
| SNP Position Transcript: | 926 |
| SNP Source: | dbSNP; Celera; HapMap; ABI_Val; HGBASE |
| Population (Allele, Count): | caucasian (C, 94\|T, 26) |
| SNP Type: | UTR5 |
| Gene Number: | 3 |
| Celera Gene: | hCG16779 - 104000117359409 |
| Celera Transcript: | hCT2319280 - 104000117359442 |
| Public Transcript Accession: | |
| Celera Protein: | hCP1786308 - 197000064918949 |
| Public Protein Accession: | |
| Gene Symbol: | STXBP5L |
| Protein Name: | |
| Celera Genomic Axis: | GA_x5YUV32VYQG (74201724 . . . 74737848) |
| Chromosome: | 3 |
| OMIM NUMBER: | 609381 |
| OMIM Information: | |
| Transcript Sequence (SEQ ID NO: 4): | |
| Protein Sequence (SEQ ID NO: 19): | |
| SNP Information | |
| Context (SEQ ID NO: 34): | |
| | CTCCAGTATTGACAAAGATTCTAAAGAAGCAATTACAGCACTATACTTCATGGACTCCTTTGCACGGAAAAATGACTCTACCATCTCTCCTTGTCTGTTC |
| | R |
| | TTGGAACCAGTCTGGGAATGGTGTTAATCATCTCCTTAAACCTACCATTAGCAGATGAACAAAGGTTTACAGAGCCAGTCATGGTATTGCCAAGTGGTAC |
| Celera SNP ID: | hCV25647188 |
| Public SNP ID: | rs17740066 |
| SNP in Transcript Sequence | SEQ ID NO: 4 |
| SNP Position Transcript: | 2686 |
| SNP Source: | Applera |
| Population (Allele, Count): | caucasian (A, 2\|G, 38) african american (A, 0\|G, 38) total (A, 2\|G, 76) |
| SNP Type: | Missense Mutation |
| Protein Coding: | SEQ ID NO: 19, at position 896, (V, GTT) (I, ATT) |
| SNP Source: | dbSNP; HapMap |
| Population (Allele, Count): | caucasian (G, 109\|A, 11) |
| SNP Type: | Missense Mutation |
| Protein Coding: | SEQ ID NO: 19, at position 896, (V, GTT) (I, ATT) |
| Gene Number: | 3 |
| Celera Gene: | hCG16779 - 104000117359409 |
| Celera Transcript: | hCT7820 - 104000117359410 |
| Public Transcript Accession: | |
| Celera Protein: | hCP34135 - 197000064918948 |
| Public Protein Accession: | |
| Gene Symbol: | STXBP5L |
| Protein Name: | |
| Celera Genomic Axis: | GA_x5YUV32VYQG (74201724 . . . 74737848) |
| Chromosome: | 3 |
| OMIM NUMBER: | 609381 |
| OMIM Information: | |
| Transcript Sequence (SEQ ID NO: 5): | |
| Protein Sequence (SEQ ID NO: 20): | |
| SNP Information | |
| Context (SEQ ID NO: 35): | |
| | CTCCAGTATTGACAAAGATTCTAAAGAAGCAATTACAGCACTATACTTCATGGACTCCTTTGCACGGAAAAATGACTCTACCATCTCTCCTTGTCTGTTC |
| | R |
| | TTGGAACCAGTCTGGGAATGGTGTTAATCATCTCCTTAAACCTACCATTAGCAGATGAACAAAGGTTTACAGAGCCAGTCATGGTATTGCCAAGTGGTAC |
| Celera SNP ID: | hCV25647188 |
| Public SNP ID: | rs17740066 |
| SNP in Transcript Sequence | SEQ ID NO: 5 |
| SNP Position Transcript: | 2686 |
| SNP Source: | Applera |
| Population (Allele, Count): | caucasian (A, 2\|G, 38) african american (A, 0\|G, 38) total (A, 2\|G, 76) |
| SNP Type: | Missense Mutation |
| Protein Coding: | SEQ ID NO: 20, at position 855, (V, GTT) (I, ATT) |
| SNP Source: | dbSNP; HapMap |
| Population (Allele, Count): | caucasian (G, 109\|A, 11) |
| SNP Type: | Missense Mutation |
| Protein Coding: | SEQ ID NO: 20, at position 855, (V, GTT) (I, ATT) |
| Gene Number: | 4 |
| Celera Gene: | hCG1819367 - 84000313923927 |
| Celera Transcript: | hCT1969300 - 84000313923928 |
| Public Transcript Accession: | NM_015878 |
| Celera Protein: | hCP1782832 - 197000069353311 |
| Public Protein Accession: | NP_056962 |
| Gene Symbol: | AZIN1 |
| Protein Name: | ornithine decarboxylase antizyme inhibitor |
| Celera Genomic Axis: | GA_x5YUV32W2RH (16981071 . . . 17038880) |
| Chromosome: | 8 |
| OMIM NUMBER: | |
| OMIM Information: | |
| Transcript Sequence (SEQ ID NO: 6): | |
| Protein Sequence (SEQ ID NO: 21): | |
| SNP Information | |
| Context (SEQ ID NO: 36): | |
| | AACCAGCCTTCATGTATTATATGAATGATGGTGTTTATGGTTCTTTTGCAAGTAAACTGTCTGAGGACTTAAATACCATTCCAGAGGTTCACAAGAAATA |
| | Y |
| | AAGGAAGATGAGCCTCTGTTTACAAGCAGCCTTTGGGGTCCATCCTGTGATGAGCTTGATCAAATTGTGGAAAGCTGTCTTCTTCCTGAGCTGAATGTGG |
| Celera SNP ID: | hCV25635059 |
| Public SNP ID: | |
| SNP in Transcript Sequence | SEQ ID NO: 6 |
| SNP Position Transcript: | 1762 |
| SNP Source: | Applera |
| Population (Allele, Count): | caucasian (T, 3\|C, 25) african american (T, 0\|C, 10) total (T, 3\|C, 35) |
| SNP Type: | Silent Mutation |
| Protein Coding: | SEQ ID NO: 21, at position 342, (Y, TAC) (Y, TAT) |
| Gene Number: | 4 |
| Celera Gene: | hCG1819367 - 84000313923927 |
| Celera Transcript: | hCT2298965 - 84000313923961 |
| Public Transcript Accession: | |
| Celera Protein: | hCP1850179 - 197000069353313 |
| Public Protein Accession: | |
| Gene Symbol: | AZIN1 |
| Protein Name: | ornithine decarboxylase antizyme inhibitor |
| Celera Genomic Axis: | GA_x5YUV32W2RH (16981071 . . . 17038880) |
| Chromosome: | 8 |
| OMIM NUMBER: | |
| OMIM Information: | |
| Transcript Sequence (SEQ ID NO: 7): | |
| Protein Sequence (SEQ ID NO: 22): | |
| SNP Information | |
| Context (SEQ ID NO: 37): | |
| | AGCCTTCATGTATTATATGAATGATGGTGTTTATGGTTCTTTTGCAAGTAAACTGTCTGAGGACTTAAATACCATTCCAGAGGTTCACAAGGCAAAAATA |
| | Y |
| | AAGGAAGATGAGCCTCTGTTTACAAGCAGCCTTTGGGGTCCATCCTGTGATGAGCTTGATCAAATTGTGGAAAGCTGTCTTCTTCCTGAGCTGAATGTGG |
| Celera SNP ID: | hCV25635059 |
| Public SNP ID: | |
| SNP in Transcript Sequence | SEQ ID NO: 7 |
| SNP Position Transcript: | 1766 |
| SNP Source: | Applera |
| Population (Allele, Count): | caucasian (T, 3\|C, 25) african american (T, 0\|C, 10) total (T, 3\|C, 35) |
| SNP Type: | Nonsense Mutation |
| Protein Coding: | SEQ ID NO: 22, at position 344,(Q,CAA) (*, TAA) |
| Gene Number: | 4 |
| Celera Gene: | hCG1819367 - 84000313923927 |
| Celera Transcript: | hCT2298966 - 84000313923945 |
| Public Transcript Accession: | NM_015878 |
| Celera Protein: | hCP1850178 - 197000069353312 |
| Public Protein Accession: | NP_056962 |
| Gene Symbol: | AZIN1 |
| Protein Name: | ornithine decarboxylase antizyme inhibitor |
| Celera Genomic Axis: | GA_x5YUV32W2RH (16981071 . . . 17038880) |
| Chromosome: | 8 |
| OMIM NUMBER: | |
| OMIM Information: | |
| Transcript Sequence (SEQ ID NO: 8): | |
| Protein Sequence (SEQ ID NO: 23): | |
| SNP Information | |
| Context (SEQ ID NO: 38): | |
| | AACCAGCCTTCATGTATTATATGAATGATGGTGTTTATGGTTCTTTTGCAAGTAAACTGTCTGAGGACTTAAATACCATTCCAGAGGTTCACAAGAAATA |
| | Y |
| | AAGGAAGATGAGCCTCTGTTTACAAGCAGCCTTTGGGGTCCATCCTGTGATGAGCTTGATCAAATTGTGGAAAGCTGTCTTCTTCCTGAGCTGAATGTGG |
| Celera SNP ID: | hCV25635059 |
| Public SNP ID: | |
| SNP in Transcript Sequence | SEQ ID NO: 8 |
| SNP Position Transcript: | 1616 |
| SNP Source: | Applera |
| Population (Allele, Count): | caucasian (T, 3\|C, 25) african american (T, 0\|C, 10) total (T, 3\|C, 35) |
| SNP Type: | Silent Mutation |
| Protein Coding: | SEQ ID NO: 23, at position 342, (Y, TAC) (Y, TAT) |
| Gene Number: | 5 |
| Celera Gene: | hCG20195 - 206000046207801 |
| Celera Transcript: | hCT11270 - 206000046207802 |
| Public Transcript Accession: | NM_000486 |
| Celera Protein: | hCP37933 - 206000046207793 |
| Public Protein Accession: | NP_000477 |
| Gene Symbol: | AQP2 |
| Protein Name: | aquaporin 2 (collecting duct) |
| Celera Genomic Axis: | GA_x5YUV32VTSP (12676538 . . . 12704672) |
| Chromosome: | 12 |
| OMIM NUMBER: | 107777 |
| OMIM Information: | Diabetes insipidus, nephrogenic, autosomal recessive, 222000 (3);/Diab |
| | etes insipidus, nephrogenic, autosomal dominant, 125800 (3) |
| Transcript Sequence (SEQ ID NO: 9): | |
| Protein Sequence (SEQ ID NO: 24): | |
| SNP Information | |
| Context (SEQ ID NO: 39): | |
| | GGGCTGGTTTCTGCCCTTTAAGAGCACCCGGTCAGTCAGAGAACAGAGATCACACACACCAAACCAGACAGAGGCAGGGCAGCATGGAGACAGGTAGACA |
| | S |
| | ACCTCCAGGTCCCTAAGCTGGGGACAGAGAAGGTTCTGAGCTGTCCCATACTCCCACTTTGTGCCAAATGACTTTGCACCTGCAAATGGTGCTTCAATGT |
| Celera SNP ID: | hCV3187664 |
| Public SNP ID: | rs2878771 |
| SNP in Transcript Sequence | SEQ ID NO: 9 |
| SNP Position Transcript: | 3903 |
| SNP Source: | dbSNP; Celera; HapMap; ABI_Val; HGBASE |
| Population (Allele, Count): | caucasian (G, 96\|C, 22) |
| SNP Type: | UTR3 |
| Gene Number: | 6 |
| Celera Gene: | hCG27399 - 146000220312482 |
| Celera Transcript: | hCT18539 - 146000220312504 |
| Public Transcript Accession: | NM_138554 |
| Celera Protein: | hCP43686 - 197000064928737 |
| Public Protein Accession: | NP_612564 |
| Gene Symbol: | TLR4 |
| Protein Name: | toll-like receptor 4 |
| Celera Genomic Axis: | GA_x5YUV32W1V9 (4592116 . . . 4625277) |
| Chromosome: | 9 |
| OMIM NUMBER: | 603030 |
| OMIM Information: | Endotoxin hyporesponsiveness (3) |
| Transcript Sequence (SEQ ID NO: 10): | |
| Protein Sequence (SEQ ID NO: 25): | |
| SNP Information | |
| Context (SEQ ID NO: 40): | |
| | GCTTTTTCAGAAGTTGATCTACCAAGCCTTGAGTTTCTAGATCTCAGTAGAAATGGCTTGAGTTTCAAAGGTTGCTGTTCTCAAAGTGATTTTGGGACAA |
| | Y |
| | CAGCCTAAAGTATTTAGATCTGAGCTTCAATGGTGTTATTACCATGAGTTCAAACTTCTTGGGCTTAGAACAACTAGAACATCTGGATTTCCAGCATTCC |
| Celera SNP ID: | hCV11722237 |
| Public SNP ID: | rs4986791 |
| SNP in Transcript Sequence | SEQ ID NO: 10 |
| SNP Position Transcript: | 1429 |
| SNP Source: | Applera |
| Population (Allele, Count): | caucasian (C, 37\|T, 3) african american (C, 36\|T, 2) total (C, 73\|T, 5) |
| SNP Type: | Missense Mutation |
| Protein Coding: | SEQ ID NO: 25, at position 399, (T, ACC) (I, ATC) |
| SNP Source: | HGMD; dbSNP; HapMap; HGBASE |
| Population (Allele, Count): | caucasian (C, 116\|T, 4) |
| SNP Type: | Missense Mutation |
| Protein Coding: | SEQ ID NO: 25, at position 399, (T, ACC) (I, ATC) |
| Gene Number: | 6 |
| Celera Gene: | hCG27399 - 146000220312482 |
| Celera Transcript: | hCT1961394 - 146000220312489 |
| Public Transcript Accession: | |
| Celera Protein: | hCP1774277 - 197000064928735 |
| Public Protein Accession: | |
| Gene Symbol: | TLR4 |
| Protein Name: | toll-like receptor 4 |
| Celera Genomic Axis: | GA_x5YUV32W1V9 (4592116 . . . 4625277) |
| Chromosome: | 9 |
| OMIM NUMBER: | 603030 |
| OMIM Information: | Endotoxin hyporesponsiveness (3) |
| Transcript Sequence (SEQ ID NO: 11): | |
| Protein Sequence (SEQ ID NO: 26): | |
| SNP Information | |
| Context (SEQ ID NO: 41): | |
| | GCTTTTTCAGAAGTTGATCTACCAAGCCTTGAGTTTCTAGATCTCAGTAGAAATGGCTTGAGTTTCAAAGGTTGCTGTTCTCAAAGTGATTTTGGGACAA |
| | Y |
| | CAGCCTAAAGTATTTAGATCTGAGCTTCAATGGTGTTATTACCATGAGTTCAAACTTCTTGGGCTTAGAACAACTAGAACATCTGGATTTCCAGCATTCC |
| Celera SNP ID: | hCV11722237 |
| Public SNP ID: | rs4986791 |
| SNP in Transcript Sequence | SEQ ID NO: 11 |
| SNP Position Transcript: | 1549 |
| SNP Source: | Applera |
| Population (Allele, Count): | caucasian (C, 37\|T, 3) african american (C, 36\|T, 2) total (C, 73\|T, 5) |
| SNP Type: | Missense Mutation |
| Protein Coding: | SEQ ID NO: 26, at position 359, (T, ACC) (I, ATC) |
| SNP Source: | HGMD; dbSNP; HapMap; HGBASE |
| Population (Allele, Count): | caucasian (C, 116\|T, 4) |
| SNP Type: | Missense Mutation |
| Protein Coding: | SEQ ID NO: 26, at position 359, (T, ACC) (I, ATC) |
| Gene Number: | 6 |
| Celera Gene: | hCG27399 - 146000220312482 |
| Celera Transcript: | hCT1961395 - 146000220312483 |
| Public Transcript Accession: | |
| Celera Protein: | hCP1774243 - 197000064928734 |
| Public Protein Accession: | |
| Gene Symbol: | TLR4 |
| Protein Name: | toll-like receptor 4 |
| Celera Genomic Axis: | GA_x5YUV32W1V9 (4592116 . . . 4625277) |
| Chromosome: | 9 |
| OMIM NUMBER: | 603030 |
| OMIM Information: | Endotoxin hyporesponsiveness (3) |
| Transcript Sequence (SEQ ID NO: 12): | |
| Protein Sequence (SEQ ID NO: 27): | |
| SNP Information | |
| Context (SEQ ID NO: 42): | |
| | GCTTTTTCAGAAGTTGATCTACCAAGCCTTGAGTTTCTAGATCTCAGTAGAAATGGCTTGAGTTTCAAAGGTTGCTGTTCTCAAAGTGATTTTGGGACAA |
| | Y |
| | CAGCCTAAAGTATTTAGATCTGAGCTTCAATGGTGTTATTACCATGAGTTCAAACTTCTTGGGCTTAGAACAACTAGAACATCTGGATTTCCAGCATTCC |
| Celera SNP ID: | hCV11722237 |
| Public SNP ID: | rs4986791 |
| SNP in Transcript Sequence | SEQ ID NO: 12 |
| SNP Position Transcript: | 1262 |
| SNP Source: | Applera |
| Population (Allele, Count): | caucasian (C, 37\|T, 3) african american (C, 36\|T, 2) total (C, 73\|T, 5) |
| SNP Type: | Missense Mutation |
| Protein Coding: | SEQ ID NO: 27, at position 199, (T, ACC) (I, ATC) |
| SNP Source: | HGMD; dbSNP; HapMap; HGBASE |
| Population (Allele, Count): | caucasian (C, 116\|T, 4) |
| SNP Type: | Missense Mutation |
| Protein Coding: | SEQ ID NO: 27, at position 199, (T, ACC) (I, ATC) |
| Gene Number: | 6 |
| Celera Gene: | hCG27399 - 146000220312482 |
| Celera Transcript: | hCT2316295 - 146000220312497 |
| Public Transcript Accession: | |
| Celera Protein: | hCP1796095 - 197000064928736 |
| Public Protein Accession: | |
| Gene Symbol: | TLR4 |
| Protein Name: | toll-like receptor 4 |
| Celera Genomic Axis: | GA_x5YUV32W1V9 (4592116 . . . 4625277) |
| Chromosome: | 9 |
| OMIM NUMBER: | 603030 |
| OMIM Information: | Endotoxin hyporesponsiveness (3) |
| Transcript Sequence (SEQ ID NO: 13): | |
| Protein Sequence (SEQ ID NO: 28): | |
| SNP Information | |
| Context (SEQ ID NO: 43): | |
| | GCTTTTTCAGAAGTTGATCTACCAAGCCTTGAGTTTCTAGATCTCAGTAGAAATGGCTTGAGTTTCAAAGGTTGCTGTTCTCAAAGTGATTTTGGGACAA |
| | Y |
| | CAGCCTAAAGTATTTAGATCTGAGCTTCAATGGTGTTATTACCATGAGTTCAAACTTCTTGGGCTTAGAACAACTAGAACATCTGGATTTCCAGCATTCC |
| Celera SNP ID: | hCV11722237 |
| Public SNP ID: | rs4986791 |
| SNP in Transcript Sequence | SEQ ID NO: 13 |
| SNP Position Transcript: | 1382 |
| SNP Source: | Applera |
| Population (Allele, Count): | caucasian (C, 37\|T, 3) african american (C, 36\|T, 2) total (C, 73\|T, 5) |
| SNP Type: | Missense Mutation |
| Protein Coding: | SEQ ID NO: 28, at position 342, (T, ACC) (I, ATC) |
| SNP Source: | HGMD; dbSNP; HapMap; HGBASE |
| Population (Allele, Count): | caucasian (C, 116\|T, 4) |
| SNP Type: | Missense Mutation |
| Protein Coding: | SEQ ID NO: 28, at position 342, (T, ACC) (I, ATC) |
| Gene Number: | 7 |
| Celera Gene: | hCG2038541 - 208000027040607 |
| Celera Transcript: | hCT2342967 - 208000027040608 |
| Public Transcript Accession: | |
| Celera Protein: | hCP1908528 - 348067965 |
| Public Protein Accession: | |
| Gene Symbol: | |
| Protein Name: | |
| Celera Genomic Axis: | GA_x5YUV32VWMC (158554 . . . 183088) |
| Chromosome: | 1 |
| OMIM NUMBER: | |
| OMIM Information: | |
| Transcript Sequence (SEQ ID NO: 14): | |
| Protein Sequence (SEQ ID NO: 29): | |
| SNP Information | |
| Context (SEQ ID NO: 44): | |
| | GACACGGGATACAGGGATCCTGAAGCCGGCGGAGGACAAGGGAGCTCCTGGGAGGACAGCTGTGCTCCGGCCTAGCAATAGCGAGCAGCTGGTCCAGACT |
| | S |
| | CCGCCGTGACTCAGAAGATAGACATGCGGAGGGTTATGATCACAGAGCAACGATGGTCCTTGTACATGAAGATAAAAATGCTCAGGTGTGCCCAGGTTGA |
| Celera SNP ID: | hCV1721645 |
| Public SNP ID: | rs4290029 |
| SNP in Transcript Sequence | SEQ ID NO: 14 |
| SNP Position Transcript: | 342 |
| SNP Source: | dbSNP; Celera; HapMap; HGBASE |
| Population (Allele, Count): | caucasian (G, 26\|C, 90) |
| SNP Type: | Missense Mutation |
| Protein Coding: | SEQ ID NO: 29, at position 42, (A, GCC) (P, CCC) |
| Gene Number: | 8 |
| Celera Gene: | hCG2040431 - 209000073576258 |
| Celera Transcript: | hCT2345641 - 209000073576259 |
| Public Transcript Accession: | |
| Celera Protein: | hCP1912489 - 232000171437069 |
| Public Protein Accession: | |
| Gene Symbol: | |
| Protein Name: | |
| Celera Genomic Axis: | GA_x5YUV32W6GH (5256635 . . . 5280581) |
| Chromosome: | 15 |
| OMIM NUMBER: | |
| OMIM Information: | |
| Transcript Sequence (SEQ ID NO: 15): | |
| Protein Sequence (SEQ ID NO: 30): | |
| SNP Information | |
| Context (SEQ ID NO: 45): | |
| | AGGCTCTCCAGTTTGGCTATTGCTAAACTTGGACTAGCCCCTACTACCGATCTTAATACCCATGTACCAATCATTGCTGCATCCTATTTGGAAAGCAATG |
| | R |
| | ACAGACAGCCACGCTGAAAGCCCTTACTAGAGACTGGTCCACAAGATCAGATTTAGCTGCCCCTGGTTTGAGCCTTGCTCCCCTGGTGTCTTTTCTGGCG |
| Celera SNP ID: | hCV1381377 |
| Public SNP ID: | rs2290351 |
| SNP in Transcript Sequence | SEQ ID NO: 15 |
| SNP Position Transcript: | 284 |
| SNP Source: | dbSNP; Celera; HapMap; ABI_Val; HGBASE |
| Population (Allele, Count): | caucasian (G, 94\|A, 26) |
| SNP Type: | Missense Mutation |
| Protein Coding: | SEQ ID NO: 30, at position 95, (G, GGA) (E, GAA) |

| | |
|---|---|
| Gene Number: | 1 |
| Celera Gene: | hCG16438 - 102000094651924 |
| Gene Symbol: | TRPM5 |
| Protein Name: | transient receptor potential cation channel, subfamily M, member 5 |
| Celera Genomic Axis: | GA_x5YUV32W6LE (2030302 . . . 2068841) |
| Chromosome: | 11 |
| OMIM NUMBER: | 604600 |
| OMIM Information: | |
| Genomic Sequence (SEQ ID NO: 46): | |
| SNP Information | |
| Context (SEQ ID NO: 57): | |
| | TCCCTTCAGCCCTGTCCCAGGGGTGCCCAGAACCCACCGCACCCCTCCACAAGGCTTCGGCCAGCCAGGGGGCCTCAGCCAGGCCCCTACCTCCAAGGTG |
| | Y |
| | TGGGATCACCATTGACCAGCAAGCAGAGGACAGGGATCTCGATGCTGCCAGTGCCTGTGGACAGGGCACCCGTGAGGCCTGAGGACCCTCCGCCTGGGGT |
| Celera SNP ID: | hCV11367838 |
| Public SNP ID: | rs886277 |
| SNP in Genomic Sequence: | SEQ ID NO: 46 |
| SNP Position Genomic: | 24030 |
| SNP Source: | Applera |
| Population (Allele, Count): | caucasian (C, 6\|T, 6) african american (C, 13\|T, 7) total (C, 19\|T, 13) |
| SNP Type: | MISSENSE MUTATION; TRANSCRIPTION FACTOR BINDING SITE; HUMAN-MOUSE SYNT |
| ENIC REGION | |
| SNP Source: | dbSNP; HapMap; HGBASE |
| Population (Allele, Count): | caucasian (T, 82\|C, 38) |
| SNP Type: | MISSENSE MUTATION; TRANSCRIPTION FACTOR BINDING SITE; HUMAN-MOUSE SYNT |
| ENIC REGION | |
| Gene Number: | 2 |
| Celera Gene: | hCG1651441 - 68000102011292 |
| Gene Symbol: | |
| Protein Name: | |
| Celera Genomic Axis: | GA_x5YUV32W6GH (5259618 . . . 5281313) |
| Chromosome: | 15 |
| OMIM NUMBER: | |
| OMIM Information: | |
| Genomic Sequence (SEQ ID NO: 47): | |
| SNP Information | |
| Context (SEQ ID NO: 58): | |
| | AGGCTCTCCAGTTTGGCTATTGCTAAACTTGGACTAGCCCCTACTACCGATCTTAATACCCATGTACCAATCATTGCTGCATCCTATTTGGAAAGCAATG |
| | R |
| | ACAGACAGCCACGCTGAAAGCCCTTACTAGAGACTGGTCCACAAGATCAGATTTAGCTGCCCCTGGTTTGAGCCTTGCTCCCCTGGTGTCTTTTCTGGCG |
| Celera SNP ID: | hCV1381377 |
| Public SNP ID: | rs2290351 |
| SNP in Genomic Sequence: | SEQ ID NO: 47 |
| SNP Position Genomic: | 10770 |
| SNP Source: | dbSNP; Celera; HapMap; ABI_Val; HGBASE |
| Population (Allele, Count): | caucasian (G, 94\|A, 26) |
| SNP Type: | MISSENSE MUTATION; UTR5; PUTATIVE UTR5 |
| Gene Number: | 3 |
| Celera Gene: | hCG16779 - 104000117359409 |
| Gene Symbol: | STXBP5L |
| Protein Name: | |
| Celera Genomic Axis: | GA_x5YUV32VYQG (74201724 . . . 74737848) |
| Chromosome: | 3 |
| OMIM NUMBER: | 609381 |
| OMIM Information: | |
| Genomic Sequence (SEQ ID NO: 48): | |
| SNP Information | |
| Context (SEQ ID NO: 59): | |
| | CTCCAGTATTGACAAAGATTCTAAAGAAGCAATTACAGCACTATACTTCATGGACTCCTTTGCACGGAAAAATGACTCTACCATCTCTCCTTGTCTGTTC |
| | R |
| | TTGGAACCAGTCTGGGAATGGTGTTAATCATCTCCTTAAACCTACCATTAGCAGATGAACAAAGGTTTACAGAGCCAGTCATGGTATTGCCAAGTGGTAA |
| Celera SNP ID: | hCV25647188 |
| Public SNP ID: | rs17740066 |
| SNP in Genomic Sequence: | SEQ ID NO: 48 |
| SNP Position Genomic: | 488085 |
| SNP Source: | Applera |
| Population (Allele, Count): | caucasian (A, 2\|G, 38) african american (A, 0\|G, 38) total (A, 2\|G, 76) |
| SNP Type: | MISSENSE MUTATION; ESS; HUMAN-MOUSE SYNTENIC REGION |
| SNP Source: | dbSNP; HapMap |
| Population (Allele, Count): | caucasian (G, 109\|A, 11) |
| SNP Type: | MISSENSE MUTATION; ESS; HUMAN-MOUSE SYNTENIC REGION |
| Gene Number: | 4 |
| Celera Gene: | hCG1819367 - 84000313923927 |
| Gene Symbol: | AZIN1 |
| Protein Name: | ornithine decarboxylase antizyme inhibitor |
| Celera Genomic Axis: | GA_x5YUV32W2RH (16981071 . . . 17038880) |
| Chromosome: | 8 |
| OMIM NUMBER: | |
| OMIM Information: | |
| Genomic Sequence (SEQ ID NO: 49): | |
| SNP Information | |
| Context (SEQ ID NO: 60): | |
| | CCACATTCAGCTCAGGAAGAAGACAGCTTTCCACAATTTGATCAAGCTCATCACAGGATGGACCCCAAAGGCTGCTTGTAAACAGAGGCTCATCTTCCTT |
| | R |
| | TATTTCTGTAGGAAAAGTTTTACAATTTAATTTTTACTCATACTTACGCAGGTATTGAATTTGTGAGTAAATAAGTATTTTCACTGTCTCAGATCCAATG |
| Celera SNP ID: | hCV25635059 |
| Public SNP ID: | |
| SNP in Genomic Sequence: | SEQ ID NO: 49 |
| SNP Position Genomic: | 13125 |
| SNP Source: | Applera |
| Population (Allele, Count): | caucasian (A, 3\|G, 25) african american (A, 0\|G, 10) total (A, 3\|G, 35) |
| SNP Type: | NONSENSE MUTATION; HUMAN-MOUSE SYNTENIC REGION; SILENT MUTATION |
| Context (SEQ ID NO: 61): | |
| | GATCCTGCAGTCCCCTAGCTGGGCAATGGAACTTCCTTGCTGCTATTATTATACAATTACAGTAATGTTGGTCTTCTCATTCATGCCACAATACAGCACA |
| | R |
| | AGCTTACAGTTAAGGAAATAGGAGTCCTCTGCTTTTTAAAGAGGTCAACATCAGTTCAGTTTTCTTATCACCCATTACCCATCCGGGCCTATGGCCATAA |
| Celera SNP ID: | hCV28037904 |
| Public SNP ID: | rs4734066 |
| SNP in Genomic Sequence: | SEQ ID NO: 49 |
| SNP Position Genomic: | 3181 |
| Related Interrogated SNP: | hCV25635059 (Power = .51) |
| SNP Source: | dbSNP; HapMap; HGBASE |
| Population (Allele, Count): | caucasian (G, 111\|A, 5) |
| SNP Type: | INTERGENIC; UNKNOWN |
| Gene Number: | 5 |
| Celera Gene: | hCG20195 - 206000046207801 |
| Gene Symbol: | AQP2 |
| Protein Name: | aquaporin 2 (collecting duct) |
| Celera Genomic Axis: | GA_x5YUV32VTSP (12676538 . . . 12704672) |
| Chromosome: | 12 |
| OMIM NUMBER: | 107777 |
| OMIM Information: | Diabetes insipidus, nephrogenic, autosomal recessive, 222000 (3);/Diabetes |
| | insipidus, nephrogenic, autosomal dominant, 125800 (3) |
| Genomic Sequence (SEQ ID NO: 50): | |
| SNP Information | |
| Context (SEQ ID NO: 62): | |
| | GGGCTGGTTTCTGCCCTTTAAGAGCACCCGGTCAGTCAGAGAACAGAGATCACACACACCAAACCAGACAGAGGCAGGGCAGCATGGAGACAGGTAGACA |
| | S |
| | ACCTCCAGGTCCCTAAGCTGGGGACAGAGAAGGTTCTGAGCTGTCCCATACTCCCACTTTGTGCCAAATGACTTTGCACCTGCAAATGGTGCTTCAATGT |
| Celera SNP ID: | hCV3187664 |
| Public SNP ID: | rs2878771 |
| SNP in Genomic Sequence: | SEQ ID NO: 50 |
| SNP Position Genomic: | 17865 |
| SNP Source: | dbSNP; Celera; HapMap; ABI_Val; HGBASE |
| Population (Allele, Count): | caucasian (G, 96\|C, 22) |
| SNP Type: | TRANSCRIPTION FACTOR BINDING SITE; HUMAN-MOUSE SYNTENIC REGION; UTR3 |
| Gene Number: | 6 |
| Celera Gene: | hCG27399 - 146000220312482 |
| Gene Symbol: | TLR4 |
| Protein Name: | toll-like receptor 4 |
| Celera Genomic Axis: | GA_x5YUV32W1V9 (4592116 . . . 4625277) |
| Chromosome: | 9 |
| OMIM NUMBER: | 603030 |
| OMIM Information: | Endotoxin hyporesponsiveness (3) |
| Genomic Sequence (SEQ ID NO: 51): | |
| SNP Information | |
| Context (SEQ ID NO: 63): | |
| | GCTTTTTCAGAAGTTGATCTACCAAGCCTTGAGTTTCTAGATCTCAGTAGAAATGGCTTGAGTTTCAAAGGTTGCTGTTCTCAAAGTGATTTTGGGACAA |
| | Y |
| | CAGCCTAAAGTATTTAGATCTGAGCTTCAATGGTGTTATTACCATGAGTTCAAACTTCTTGGGCTTAGAACAACTAGAACATCTGGATTTCCAGCATTCC |
| Celera SNP ID: | hCV11722237 |
| Public SNP ID: | rs4986791 |
| SNP in Genomic Sequence: | SEQ ID NO: 51 |
| SNP Position Genomic: | 19084 |
| SNP Source: | Applera |
| Population (Allele,Count): | caucasian (C, 37\|T, 3) african american (C, 36\|T, 2) total (C, 73\|T, 5) |
| SNP Type: | MISSENSE MUTATION; HUMAN-MOUSE SYNTENIC REGION |
| SNP Source: | HGMD; dbSNP; HapMap; HGBASE |
| Population (Allele,Count): | caucasian (C, 116\|T, 4) |
| SNP Type: | MISSENSE MUTATION; HUMAN-MOUSE SYNTENIC REGION |
| Gene Number: | 7 |
| Celera Gene: | hCG2038541 - 208000027040607 |
| Gene Symbol: | |
| Protein Name: | |
| Celera Genomic Axis: | GA_x5YUV32VWMC (158554 . . . 183088) |
| Chromosome: | 1 |
| OMIM NUMBER: | |
| OMIM Information: | |
| Genomic Sequence (SEQ ID NO: 52): | |
| SNP Information | |
| Context (SEQ ID NO: 64): | |
| | TCAACCTGGGCACACCTGAGCATTTTTATCTTCATGTACAAGGACCATCGTTGCTCTGTGATCATAACCCTCCGCATGTCTATCTTCTGAGTCACGGCGG |
| | S |
| | AGTCTGGACCAGCTGCTCGCTATTGCTAGGCCGGAGCACAGCTGTCCTCCCAGGAGCTCCCTTGTCCTCCGCCGGCTTCAGGATCCCTGTATCCCGTGTC |
| Celera SNP ID: | hCV1721645 |
| Public SNP ID: | rs4290029 |
| SNP in Genomic Sequence: | SEQ ID NO: 52 |
| SNP Position Genomic: | 14193 |
| SNP Source: | dbSNP; Celera; HapMap; HGBASE |
| Population (Allele, Count): | caucasian (C, 26\|G, 90) |
| SNP Type: | MISSENSE MUTATION |
| Gene Number: | 8 |
| Celera Gene: | hCG2040431 - 209000073576258 |
| Gene Symbol: | |
| Protein Name: | |
| Celera Genomic Axis: | GA_x5YUV32W6GH (5256635 . . . 5280581) |
| Chromosome: | 15 |
| OMIM NUMBER: | |
| OMIM Information: | |
| Genomic Sequence (SEQ ID NO: 53): | |
| SNP Information | |
| Context (SEQ ID NO: 65): | |
| | AGGCTCTCCAGTTTGGCTATTGCTAAACTTGGACTAGCCCCTACTACCGATCTTAATACCCATGTACCAATCATTGCTGCATCCTATTTGGAAAGCAATG |
| | R |
| | ACAGACAGCCACGCTGAAAGCCCTTACTAGAGACTGGTCCACAAGATCAGATTTAGCTGCCCCTGGTTTGAGCCTTGCTCCCCTGGTGTCTTTTCTGGCG |
| Celera SNP ID: | hCV1381377 |
| Public SNP ID: | rs2290351 |
| SNP in Genomic Sequence: | SEQ ID NO: 53 |
| SNP Position Genomic: | 13753 |
| SNP Source: | dbSNP; Celera; HapMap; ABI_Val; HGBASE |
| Population (Allele, Count): | caucasian (G, 94\|A, 26) |
| SNP Type: | MISSENSE MUTATION; UTR5; PUTATIVE UTR5 |
| Gene Number: | 9 |
| Celera Gene: | hCG15011 - 209000105738204 |
| Gene Symbol: | FLJ45248 |
| Protein Name: | FLJ45248 protein |
| Celera Genomic Axis: | GA_x5YUV32W2RH (17019016 . . . 17116432) |
| Chromosome: | 8 |
| OMIM NUMBER: | |
| OMIM Information: | |
| Genomic Sequence (SEQ ID NO: 54): | |
| SNP Information | |
| Context (SEQ ID NO: 66): | |
| | ATAAGGTCTGATGGGGACAGACCTGGGGTGAATCTCAGTGGCACTTCTCAACAGCTATAGATCCCTAAGTAAGTTATCTAATCATCATCCCCACAGTGTT |
| | Y |
| | TCAGATGAAAATGGGGGGTAATACCCCATCTCATAGGAGTTTAAAAGGATTAAATAGGGAATGTAGCTATCATCTTGTGCCTGGAATTCTGCAAAGCATA |
| Celera SNP ID: | hCV228234 |
| Public SNP ID: | rs12547652 |
| SNP in Genomic Sequence: | SEQ ID NO: 54 |
| SNP Position Genomic: | 37725 |
| Related Interrogated SNP: | hCV25635059 (Power = .51) |
| SNP Source: | dbSNP; Celera; HapMap |
| Population (Allele, Count): | caucasian (C, 114\|T, 6) |
| SNP Type: | INTRON; REPEATS |
| Context (SEQ ID NO: 67): | |
| | ACCAAAGACACCTGGGGTTGTTTTCTGCTTCTTGTTGTTTGTTGTTTTATTTTGCAAGAGCAGATAATGATCAGTTTAGAGTCTGGTTTCCCTGGTGCCA |
| | R |
| | AAACAAACCCTAGTACCTCCTGTTTCTGGCTCAACTGTCCCCAGCCGTCTCAAGTGATCCAGTTGGAACGCGGAGAACAGAGAACAACTGACTTCCCCTT |
| Celera SNP ID: | hCV1716152 |
| Public SNP ID: | rs12546960 |
| SNP in Genomic Sequence: | SEQ ID NO: 54 |
| SNP Position Genomic: | 43967 |
| Related Interrogated SNP: | hCV25635059 (Power = .51) |
| SNP Source: | dbSNP; Celera; HapMap |
| Population (Allele, Count): | caucasian (A, 114\|G, 6) |
| SNP Type: | INTRON |
| Context (SEQ ID NO: 68): | |
| | TTTATGTGATAACACCCAGCCTGGCAGTATAGCACCCTTGCCACCCACAGCTCTCTGGAAGGTACAGCTGTACAAGATAACATGAGGTAATGTGACTTCT |
| | R |
| | GGGATAGGTGGTGGTGGGGAAGCCCATCACTGCTTAGACCAGCGTCGAACATGCCTGACCCAGGTGGAGTAAATTATTTGCTCAGAAATGACTTGTGTGG |
| Celera SNP ID: | hCV1716155 |
| Public SNP ID: | rs12546479 |
| SNP in Genomic Sequence: | SEQ ID NO: 54 |
| SNP Position Genomic: | 30594 |
| Related Interrogated SNP: | hCV25635059 (Power = .51) |
| SNP Source: | dbSNP; Celera; HapMap |
| Population (Allele, Count): | caucasian (G, 114\|A, 6) |
| SNP Type: | INTRON |
| Gene Number: | 10 |
| Celera Gene: | hCG1640180 - 64000127155558 |
| Gene Symbol: | AQP5 |
| Protein Name: | aquaporin 5 |
| Celera Genomic Axis: | GA_x5YUV32VTSP (12687288 . . . 12711611) |
| Chromosome: | 12 |
| OMIM NUMBER: | 600442 |
| OMIM Information: | |
| Genomic Sequence (SEQ ID NO: 55): | |
| SNP Information | |
| Context (SEQ ID NO: 69): | |
| | GGGCTGGTTTCTGCCCTTTAAGAGCACCCGGTCAGTCAGAGAACAGAGATCACACACACCAAACCAGACAGAGGCAGGGCAGCATGGAGACAGGTAGACA |
| | S |
| | ACCTCCAGGTCCCTAAGCTGGGGACAGAGAAGGTTCTGAGCTGTCCCATACTCCCACTTTGTGCCAAATGACTTTGCACCTGCAAATGGTGCTTCAATGT |
| Celera SNP ID: | hCV3187664 |
| Public SNP ID: | rs2878771 |
| SNP in Genomic Sequence: | SEQ ID NO: 55 |
| SNP Position Genomic: | 7115 |
| SNP Source: | dbSNP; Celera; HapMap; ABI_Val; HGBASE |
| Population (Allele, Count): | caucasian (G, 96\|C, 22) |
| SNP Type: | TRANSCRIPTION FACTOR BINDING SITE; HUMAN-MOUSE SYNTENIC REGION; UTR3 |
| Gene Number: | 11 |
| Celera Gene: | hCG1640663 - 84000313924023 |
| Gene Symbol: | |
| Protein Name: | |
| Celera Genomic Axis: | GA_x5YUV32W2RH (17041712 . . . 17107740) |
| Chromosome: | 8 |
| OMIM NUMBER: | |
| OMIM Information: | |
| Genomic Sequence (SEQ ID NO: 56): | |
| SNP Information | |
| Context (SEQ ID NO: 70): | |
| | ATAAGGTCTGATGGGGACAGACCTGGGGTGAATCTCAGTGGCACTTCTCAACAGCTATAGATCCCTAAGTAAGTTATCTAATCATCATCCCCACAGTGTT |
| | Y |
| | TCAGATGAAAATGGGGGGTAATACCCCATCTCATAGGAGTTTAAAAGGATTAAATAGGGAATGTAGCTATCATCTTGTGCCTGGAATTCTGCAAAGCATA |
| Celera SNP ID: | hCV228234 |
| Public SNP ID: | rs12547652 |
| SNP in Genomic Sequence: | SEQ ID NO: 56 |
| SNP Position Genomic: | 15029 |
| Related Interrogated SNP: | hCV25635059 (Power = .51) |
| SNP Source: | dbSNP; Celera; HapMap |
| Population (Allele, Count): | caucasian (C, 114\|T, 6) |
| SNP Type: | INTRON; REPEATS |
| Context (SEQ ID NO: 71): | |
| | ACCAAAGACACCTGGGGTTGTTTTCTGCTTCTTGTTGTTTGTTGTTTTATTTTGCAAGAGCAGATAATGATCAGTTTAGAGTCTGGTTTCCCTGGTGCCA |
| | R |
| | AAACAAACCCTAGTACCTCCTGTTTCTGGCTCAACTGTCCCCAGCCGTCTCAAGTGATCCAGTTGGAACGCGGAGAACAGAGAACAACTGACTTCCCCTT |
| Celera SNP ID: | hCV1716152 |
| Public SNP ID: | rs12546960 |
| SNP in Genomic Sequence: | SEQ ID NO: 56 |
| SNP Position Genomic: | 21271 |
| Related Interrogated SNP: | hCV25635059 (Power = .51) |
| SNP Source: | dbSNP; Celera; HapMap |
| Population (Allele, Count): | caucasian (A, 114\|G, 6) |
| SNP Type: | INTRON |
| Context (SEQ ID NO: 72): | |
| | TTTATGTGATAACACCCAGCCTGGCAGTATAGCACCCTTGCCACCCACAGCTCTCTGGAAGGTACAGCTGTACAAGATAACATGAGGTAATGTGACTTCT |
| | R |
| | GGGATAGGTGGTGGTGGGGAAGCCCATCACTGCTTAGACCAGCGTCGAACATGCCTGACCCAGGTGGAGTAAATTATTTGCTCAGAAATGACTTGTGTGG |
| Celera SNP ID: | hCV1716155 |
| Public SNP ID: | rs12546479 |
| SNP in Genomic Sequence: | SEQ ID NO: 56 |
| SNP Position Genomic: | 7898 |
| Related Interrogated SNP: | hCV25635059 (Power = .51) |
| SNP Source: | dbSNP; Celera; HapMap |
| Population (Allele, Count): | caucasian (G, 114\|A, 6) |
| SNP Type: | INTRON |

| | |
|---|---|
| hCV25635059 | SEQ ID NO: 36 |
| hCV25635059 | SEQ ID NO: 37 |
| hCV25635059 | SEQ ID NO: 38 |

| | |
|---|---|
| hCV25635059 | SEQ ID NO:60 |

The application's sequence listing, which the Patent Office published only in electronic form, follows.

SEQUENCE LISTING (93 sequences)

SEQ ID NO: 1 - DNA, 3534 bp, Homo sapiens
gaggccaccatgcaggatgtccaaggcccccgtcccggaagccccggggatgctgaagaccggcgggagctgggcttgcacaggggcgaggtcaactttggagggtctgggaagaagcgaggcaagtttgtacgggtgccgagcggagtggccccgtctgtgctctttgacctgctgcttgctgagtggcacctgccggcccccaacctggtggtgtccctggtgggtgaggagcagcctttcgccatgaagtcctggctgcgggatgtgctgcgcaaggggctggtgaaggcggctcagagcacaggagcctggatcctgaccagtgccctccgcgtgggcctggccaggcatgtcgggcaggccgtgcgcgaccactcgctggccagcacgtccaccaaggtccgtgtggttgctgtcggcatggcctcgctgggccgcgtcctgcaccgccgcattctggaggaggcccaggaggattttcctgtccactaccctgaggatgacggcggcagccagggccccctctgttcactggacagcaacctctcccacttcatcctggtggagccaggccccccggggaagggcgatgggctgacggagctgcggctgaggctggagaagcacatctcggagcagagggcgggctacgggggcactggcagcatcgagatccctgtcctctgcttgctggtcaatggtgatcccaacaccttggagaggatctccagggccgtggagcaggctgccccgtggctgatcctggcaggctcggggggcatcgccgatgtgcttgctgccctagtgaaccagccccacctcctggtgcccaaggtggccgagaagcagtttaaggagaagttccccagcaagcatttctcttgggaggacatcgtgcgctggaccaagctgctgcagaacatcacctcacaccagcacctgctcaccgtgtatgacttcgagcaggagggctccgaggagctggacacggtcatcctgaaggcgctggtgaaagcctgcaagagccacagccaggagcctcaggactatctggatgagctcaagctggccgtggcctgggaccgcgtggacatcgccaagagtgagatcttcaatggggacgtggagtggaagtcctgtgacctggaggaggtgatggtggacgccctggtcagcaacaagcccgagtttgtgcgcctctttgtggacaacggcgcagacgtggccgacttcctgacgtatgggcggctgcaggagctctaccgctccgtgtcacgcaagagcctgctcttcgacctgctgcagcggaagcaggaggaggcccggctgacgctggccggcctgggcacccagcaggcccgggagccacccgcggggccaccggccttctccctgcacgaggtctcccgcgtactcaaggacttcctgcaggacgcctgccgaggcttctaccaggacggccggccaggggaccgcaggagggcggagaagggcccggccaagcggcccacgggccagaagtggctgctggacctgaaccagaagagcgagaacccctggcgggacctgttcctgtgggccgtgctgcagaaccgccacgagatggccacctacttctgggccatgggccaggaaggtgtggcagccgcactggccgcctgcaaaatcctcaaagagatgtcgcacctggagacggaggccgaggcggcccgagccacgcgcgaggcgaaatacgagcagctggccctcgacctcttctccgagtgctacagcaacagtgaggcccgcgccttcgccctgctggtgcgccggaaccgctgctggagcaagaccacctgcctgcacctggccaccgaggctgacgccaaggccttctttgcccacgacggcgttcaggccttcctgaccaggatctggtggggggacatggccgcaggcacgcccatcctgcggctgctaggagccttcctctgccccgccctcgtctataccaacctcatcaccttcagtgaggaagctcccctgaggacaggcctggaggacctgcaggacctggacagcctggacacggagaagagcccgctgtatggcctgcagagccgggtggaggagctggtggaggcgccgagggctcagggtgaccgaggcccacgtgctgtcttcctgctcacacgctggcggaaattctggggcgctcccgtgactgtgttcctggggaacgtggtcatgtacttcgccttcctcttcctgttcacctacgtcctgctggtggacttcaggccgcccccccagggcccctcagggcccgaggtcaccctctacttctgggtctttacgctggtgctggaggaaatccggcagggcttcttcacagacgaggacacacacctggtgaagaagttcacactgtatgtgggggacaactggaacaagtgtgacatggtggccatcttcctgttcatcgtgggtgtcacctgcaggatgctgccgtcggcgtttgaggctggccgcacagtcctcgccatggacttcatggtgttcacgctgcggctgatccatatctttgccatacacaagcagctgggccccaagatcatcgtggtagagcgcatgatgaaggacgtcttcttcttcctcttctttctgagcgtgtggctcgtggcctacggtgtcaccacccaggcgctgctgcacccccatgacggccgcctggagtggatcttccgccgggtgctctaccggccctacctgcagatcttcggccagatcccactggacgagattgatgaagcccgtgtgaactgctccacccacccactgctgctggaggactcaccatcctgccccagcctctatgccaactggctggtcatcctcctgctggtcaccttcctgttggtcaccaatgtgctgctcatgaacctgctcatcgccatgttcagctacacgttccaggtggtgcagggcaacgcagacatgttctggaagttccagcgctacaacctgattgtggagtaccacgagcgccccgccctggccccgcccttcatcctgctcagccacctgagcctgacgctccgccgggtcttcaagaaggaggctgagcacaagcgggagcacctggagagagacctgccagaccccctggaccagaaggtcgtcacctgggagacagtccagaaggagaacttcctgagcaagatggagaagcggaggagggacagcgagggggaggtgctgcggaaaaccgcccacagagtggacttcattgccaagtacctcggggggctgagagagcaagaaaagcgcatcaagtgtctggaagccctggagcttcccggacgtgtttcccttctccagatcaactactgctcggtgctcgtgtcctccgtggctgacgtgctggcccagggtggcggcccccggagctctcagcactgtggcgagggaagccagctggtggctgctgaccacagaggtggtttagatggctgggaacaacccggggctggccagcctccctcggacacc

SEQ ID NO: 2 - DNA, 3934 bp, Homo sapiens
gaggccaccatgcaggatgtccaaggcccccgtcccggaagccccggggatgctgaagaccggcgggagctgggcttgcacaggggcgaggtcaactttggagggtctgggaagaagcgaggcaagtttgtacgggtgccgagcggagtggccccgtctgtgctctttgacctgctgcttgctgagtggcacctgccggcccccaacctggtggtgtccctggtgggtgaggagcagcctttcgccatgaagtcctggctgcgggatgtgctgcgcaaggggctggtgaaggcggctcagagcacaggagcctggatcctgaccagtgccctccgcgtgggcctggccaggcatgtcgggcaggccgtgcgcgaccactcgctggccagcacgtccaccaaggtccgtgtggttgctgtcggcatggcctcgctgggccgcgtcctgcaccgccgcattctggaggaggcccaggaggattttcctgtccactaccctgaggatgacggcggcagccagggccccctctgttcactggacagcaacctctcccacttcatcctggtggagccaggccccccggggaagggcgatgggctgacggagctgcggctgaggctggagaagcacatctcggagcagagggcgggctacgggggcactggcagcatcgagatccctgtcctctgcttgctggtcaatggtgatcccaacaccttggagaggatctccagggccgtggagcaggctgccccgtggctgatcctggcaggctcggggggcatcgccgatgtgcttgctgccctagtgaaccagccccacctcctggtgcccaaggtggccgagaagcagtttaaggagaagttccccagcaagcatttctcttgggaggacatcgtgcgctggaccaagctgctgcagaacatcacctcacaccagcacctgctcaccgtgtatgacttcgagcaggagggctccgaggagctggacacggtcatcctgaaggcgctggtgaaagcctgcaagagccacagccaggagcctcaggactatctggatgagctcaagctggccgtggcctgggaccgcgtggacatcgccaagagtgagatcttcaatggggacgtggagtggaagtcctgtgacctggaggaggtgatggtggacgccctggtcagcaacaagcccgagtttgtgcgcctctttgtggacaacggcgcagacgtggccgacttcctgacgtatgggcggctgcaggagctctaccgctccgtgtcacgcaagagcctgctcttcgacctgctgcagcggaagcaggaggaggcccggctgacgctggccggcctgggcacccagcaggcccgggagccacccgcggggccaccggccttctccctgcacgaggtctcccgcgtactcaaggacttcctgcaggacgcctgccgaggcttctaccaggacggccggccaggggaccgcaggagggcggagaagggcccggccaagcggcccacgggccagaagtggctgctggacctgaaccagaagagcgagaacccctggcgggacctgttcctgtgggccgtgctgcagaaccgccacgagatggccacctacttctgggccatgggccaggaaggtgtggcagccgcactggccgcctgcaaaatcctcaaagagatgtcgcacctggagacggaggccgaggcggcccgagccacgcgcgaggcgaaatacgagcagctggccctcgacctcttctccgagtgctacagcaacagtgaggcccgcgccttcgccctgctggtgcgccggaaccgctgctggagcaagaccacctgcctgcacctggccaccgaggctgacgccaaggccttctttgcccacgacggcgttcaggccttcctgaccaggatctggtggggggacatggccgcaggcacgcccatcctgcggctgctaggagccttcctctgccccgccctcgtctataccaacctcatcaccttcagtgaggaagctcccctgaggacaggcctggaggacctgcaggacctggacagcctggacacggagaagagcccgctgtatggcctgcagagccgggtggaggagctggtggaggcgccgagggctcagggtgaccgaggcccacgtgctgtcttcctgctcacacgctggcggaaattctggggcgctcccgtgactgtgttcctggggaacgtggtcatgtacttcgccttcctcttcctgttcacctacgtcctgctggtggacttcaggccgcccccccagggcccctcagggcccgaggtcaccctctacttctgggtctttacgctggtgctggaggaaatccggcagggcttcttcacagacgaggacacacacctggtgaagaagttcacactgtatgtgggggacaactggaacaagtgtgacatggtggccatcttcctgttcatcgtgggtgtcacctgcaggatgctgccgtcggcgtttgaggctggccgcacagtcctcgccatggacttcatggtgttcacgctgcggctgatccatatctttgccatacacaagcagctgggccccaagatcatcgtggtagagcgcatgatgaaggacgtcttcttcttcctcttctttctgagcgtgtggctcgtggcctacggtgtcaccacccaggcgctgctgcacccccatgacggccgcctggagtggatcttccgccgggtgctctaccggccctacctgcagatcttcggccagatcccactggacgagattgatgaagcccgtgtgaactgctccacccacccactgctgctggaggactcaccatcctgccccagcctctatgccaactggctggtcatcctcctgctggtcaccttcctgttggtcaccaatgtgctgctcatgaacctgctcatcgccatgttcagctacacgttccaggtggtgcagggcaacgcagacatgttctggaagttccagcgctacaacctgattgtggagtaccacgagcgccccgccctggccccgcccttcatcctgctcagccacctgagcctgacgctccgccgggtcttcaagaaggaggctgagcacaagcgggagcacctggagagagacctgccagaccccctggaccagaaggtcgtcacctgggagacagtccagaaggagaacttcctgagcaagatggagaagcggaggagggacagcgagggggaggtgctgcggaaaaccgcccacagagtggacttcattgccaagtacctcggggggctgagagagcaagaaaagcgcatcaagtgtctggagtcacagatcaactactgctcggtgctcgtgtcctccgtggctgacgtgctggcccagggtggcggcccccggagctctcagcactgtggcgagggaagccagctggtggctgctgaccacagaggtggtttagatggctgggaacaacccggggctggccagcctccctcggacacctgagctgcttggcctgccacgtgtggggccacctctcctcagctggccaccctgcacgttgtgcactgacctttgccgacctccagcggaaccccccagggggcaccagccccccagcagacaatggccctcctggtgcctcaccacagaccctcacccaaaggaaccgctccttgtccctcctggcctccccggaggcacagcagtgtcatggggctgtctcccctgacaggcacaactccccgggcagaaaacgtgccccaccgcatccctacctggaaactgaccagcctgcactgtggaaaagctggccctgtggcgtgacgggggagcacccccatccagactgcgaagctgctctggggtctgcacccacccctgccctgacttgtgttgcctgacaagagactcatctttttttgaaacactg

SEQ ID NO: 3 - DNA, 1641 bp, Homo sapiens
gtatagaatactaggctttcctttttttgtgagatgggggtctcacactgtggctcaggctggagtgcagtggtgtgatcatggctcactgcagcctcgaagccccggggtcaagtgatcctctcacctcagcctcctaggtagctggaaccacaggcacgcaaccaccactcctggctagttttatttttttagtagaataaggtctcactatgttgcacaggctggtctctaactccttacctcaagccatcctcccgccttggcctcccaaacatgttgggattacaggtgtgagccactggacctggccaaatactgggttttcagtgctcactgccactaataaaaatctgaaattctttcattatgcaatttctaagtgcctggtgagggccaagctcagttctaggctctgaagattaagagagaaacaaggctctgtctgctcctgttgtctctgtgagcatctttgacagagtgctcagattgttgggatatagtgcatcggactggcagcctgaatttgtggagaccgcagtcagtaactttgtgatatatggaatatttagaggacagtaacccatttccctacgccctacctgatcacatcgtgccctgctgggccataccccaaacagcccaccttcctctaggcctggccatggccctgtgcctgccacattgaggattaagtcaggatatcttgagccctctcaaatccctgtttattcaggcctctgccacatatagagccagccttctgtccccaccacttccactaccatggagcccacttagtaaaacgctctctgggcccagcttcgccagaaaagacaccaggggagcaaggctcaaaccaggggcagctaaatctgatcttgtggaccagtctctagtaagggctttcagcgtggctgtctgtccattgctttccaaataggatgcagcaatgattggtacatgggtattaagatcggtagtaggggctagtccaagtttagcaatagccaaactggagagcctctgaagtatgagagtcccagagggatttgtcagctcctggcagacatcctgattttcaccttcctgagtctaccctaccccagagggtgccagtctcactgtggtgatggttagcccagtgtgtgctgcactcacacaccagcacggggtccgtgcttgcaggctggtggatgctgtcctctgggttaagactgtctcccttctcgggagcactggagggttctccatctgcgtgtttcagtggaagttggcagatacgaaaacaggcccctatagggaagcagttccatgaaaatgattaattctttccaaaagacttaaaattttttcctatttcaattttcctttcaaaaaaggaaatacattcatgtagttcaaaacttaagaaaacaaaagtctgttcagcaaaagaaagtgtttccaattttaaggttaagaaacaaagtccctggatttgtgttagggatgtcttcctgagagtgggttgtgttccgtttgaccctggcggttgacctcggcccactaggatcatgccgccctctccagggaggagggcctccccatcaccctgtacagtggcaccccagccctggcactgcccgcccttgctcagcg

SEQ ID NO: 4 - DNA, 4064 bp, Homo sapiens
atggaaatgttcgcatttgctaatgtaaacaattgccagccccaccttatgatacgaaccattaagccattattggtaacagcaggggttaatcacagatacaagttgagtgcagtgtttaaaatgaagaagtttaatttccgaaaagttttggatggcttaactgcctcctcccctggcagtggtagcagcagtggcagtaacagtggtggtggggctggaagtggttccgtacatccggcggggactgcaggggttctcagagaggaaattcaggaaactttgacttcggagtatttccagatttgcaagacagttcggcatggttttcctcatcagcccacagcattagcctttgatccagttcagaaaatcttggctattgggacgagaacaggtgctatacgaatactcgggagacctggtgttgattgctattgccaacatgaaagtggtgcagctgtcctacagctccaatttttgatcaatgagggtgccttggtcagtgcaagttcagatgatacacttcatttgtggaaccttagacaaaaaaggccagccatactccattctcttaaatttaaccgggaacgaattacttactgtcatctacctttccagagtaaatggctttatgttggaacagaaagaggaaatacacatattgtaaatattgaatctttcattctttctggatatgttatcatgtggaacaaggcaattgaactatccactaagactcatccaggtccagttgtacatttaagcgatagcccaagagatgaaggcaaactgctaataggttatgaaaatggtactgtagtattctgggacttgaaatctaaaagagcagaactgagagtttattatgatgaggctattcattcaattgattggcatcatgagggcaaacagttcatgtgcagccattcagatggtagtttgactttatggaacctgaaaagcccaagtcgccctttccagaccacaattccacatggaaaaagtcaaagagaaggaagaaaatctgaatcttgtaaaccaattcttaaagtagaatacaagacctgcaaaaacagcgaaccattcataatattctctggtgggctgtcctatgacaaagcttgtagaagaccaagtttaaccatcatgcatggaaaagcaattacagtacttgaaatggatcatcctattgttgaatttctaactttatgtgaaacgccctatccaaatgaatttcaagaaccctatgctgtcgtggtacttctggagaaagatctcattgtagttgatctgacacaaagcaattttccaatctttgaaaatccatatcccatggacattcatgaatcaccagttacatgcacagcatactttgcagattgtcctccggatttgattctagtactgtattctataggagtcaagcataaaaaacaaggatacagtaataaggagtggccaatcagtggaggagcttggaaccttggagcacaaacatatccagaaattattattactggtcatgcagatggatcaataaaattttgggatgcttctgcaataactctgcagatgctgtacaagctaaaaacttcaaaagtgtttgaaaaacagaaggtaggagaaggaaaacaaacatgtgaaattgtagaggaagacccatttgccattcagatgatttactggtgtccagagagcagaatattctgtgtatcaggagtctctgcatatgtcataatttataaattcagcagacatgaaattacaacagaaatagtgtcattagaggtacgacttcagtatgatgttgaagatattattacccctgaaccagaaacaagtcctccgtttccagatctctcagcccagcttccttcttcaaggagtctttctgggagcactaacactgttgctagtgaaggagtaacaaaggacagtattccatgcctcaatgtgaagacacggccagtgcgaatgcctccaggatatcaagcagaacttgttattcaattggtgtgggtagatggtgaacctccacaacagattactagtcttgctgtaagctcagcatatggaatagttgcatttgggaactgcaatgggttggctgtggtggattttatacagaagacagtactgttaagcatggggaccattgacctatatagatcaagtgacttataccagcgacaaccacggtctcctcgaaaaaacaaacagttcattgcagacaacttttgcatgcgtggcctgtctaacttttatcctgatttaacgaaacggatccgtacttcctatcagagtttaactgaactgaatgacagtccagttcccctagaacttgagcgctgcaagtctcctacctcagaccatgtaaatggacactgcacaagtccaacttctcagagttgcagttctggaaaacgtctttctagtgccgatgtttcaaaagtaaatcgctggggtcctggaagaccaccatttcgaaaggcccagtcagcagcctgcatggagatttctttaccagttacaacagaagaaaaccgagaaaattcctataatcgttctagaagctctagtatctccagtattgacaaagattctaaagaagcaattacagcactatacttcatggactcctttgcacggaaaaatgactctaccatctctccttgtctgttcgttggaaccagtctgggaatggtgttaatcatctccttaaacctaccattagcagatgaacaaaggtttacagagccagtcatggtattgccaagtggtacattcctctcattgaaaggagctgtgctaacattctcctgtatggaccgaatgggtggattaatgcaaccgccatatgaagtttggagggatccaaacaacatagatgaaaatgaaaaatcttggagaaggaaagtggtaatgaactcatcttctgcatcccaagaaataggagatcatcagtatacaataatctgctcagaaaaacaagccaaagtcttctcactgccttctcagacttgcctttatgttcataacatcacggagacatcttttatactgcaagcaaatgtggtggtcatgtgtagcagtgcctgcttggcatgcttttgtgctaacggacatatcatgataatgagcctacctagtcttcgcccaatgttggatgttaattatttgccactgacagacatgaggatagcacgaacattttgttttaccaatgaaggacaggcattatacctcgtctctcctactgaaattcagcggttaacatacagccaagaaatgtgtgataatctacaggacatgctaggagatttgtttactcccatagagacaccagaagctcaaaacagaggctttctcaagggactgtttggtggaagcggacaaacatttgacagagaagagctctttggggaagcttcggcaggaaaagcatcccgcagccttgcgcaacacattcctggaccaggtagtatagaagggatgaaaggcgctgctggaggggtgatgggagagctgacccgtgcacggattgcacttgatgaaagaggacagaggctaggagagctggaagagaaaactgcaggcatgatgaccagtgcagaagcattttccaaacatgcacatgagttaatgctgaaatacaaggataagaaatggtaccaattctgacttctaaagaagctgtgactgctttgagaaaccatattcagggaaaccaaatttattcccagcatcactactcaactgctagaagccagtttcttctacaaaatgttccatttacagtcaatctgaaattttcataaaagagatgtatcagagacactgtgcaacccaaaggctggagccctggttaaaatcccaaaatacggctgaatttgccttttcccatgtggaatggagctatcatcttggcatgtcattcgataaggatttatatttagtaactacggggagtcctcttgatttgaaaattcctgtacaaacaaaagcattaatgcacttaatgaaaaaaaatctttgcatgataaattaacatcttaagggga

SEQ ID NO: 5 - DNA, 4064 bp, Homo sapiens
acctcggagagcgccaggcgccgcgaccagagggcccagagaagcggccggagcccgcctacctcggccccctcagcttcccgggctggcaggcggctagaggcgtctgaggaagtgtttaaaatgaagaagtttaatttccgaaaagttttggatggcttaactgcctcctcccctggcagtggtagcagcagtggcagtaacagtggtggtggggctggaagtggttccgtacatccggcggggactgcaggggttctcagagaggaaattcaggaaactttgacttcggagtatttccagatttgcaagacagttcggcatggttttcctcatcagcccacagcattagcctttgatccagttcagaaaatcttggctattgggacgagaacaggtgctatacgaatactcgggagacctggtgttgattgctattgccaacatgaaagtggtgcagctgtcctacagctccaatttttgatcaatgagggtgccttggtcagtgcaagttcagatgatacacttcatttgtggaaccttagacaaaaaaggccagccatactccattctcttaaatttaaccgggaacgaattacttactgtcatctacctttccagagtaaatggctttatgttggaacagaaagaggaaatacacatattgtaaatattgaatctttcattctttctggatatgttatcatgtggaacaaggcaattgaactatccactaagactcatccaggtccagttgtacatttaagcgatagcccaagagatgaaggcaaactgctaataggttatgaaaatggtactgtagtattctgggacttgaaatctaaaagagcagaactgagagtttattatgatgaggctattcattcaattgattggcatcatgagggcaaacagttcatgtgcagccattcagatggtagtttgactttatggaacctgaaaagcccaagtcgccctttccagaccacaattccacatggaaaaagtcaaagagaaggaagaaaatctgaatcttgtaaaccaattcttaaagtagaatacaagacctgcaaaaacagcgaaccattcataatattctctggtgggctgtcctatgacaaagcttgtagaagaccaagtttaaccatcatgcatggaaaagcaattacagtacttgaaatggatcatcctattgttgaatttctaactttatgtgaaacgccctatccaaatgaatttcaagaaccctatgctgtcgtggtacttctggagaaagatctcattgtagttgatctgacacaaagcaattttccaatctttgaaaatccatatcccatggacattcatgaatcaccagttacatgcacagcatactttgcagattgtcctccggatttgattctagtactgtattctataggagtcaagcataaaaaacaaggatacagtaataaggagtggccaatcagtggaggagcttggaaccttggagcacaaacatatccagaaattattattactggtcatgcagatggatcaataaaattttgggatgcttctgcaataactctgcagatgctgtacaagctaaaaacttcaaaagtgtttgaaaaacagaaggtaggagaaggaaaacaaacatgtgaaattgtagaggaagacccatttgccattcagatgatttactggtgtccagagagcagaatattctgtgtatcaggagtctctgcatatgtcataatttataaattcagcagacatgaaattacaacagaaatagtgtcattagaggtacgacttcagtatgatgttgaagatattattacccctgaaccagaaacaagtcctccgtttccagatctctcagcccagcttccttcttcaaggagtctttctgggagcactaacactgttgctagtgaaggagtaacaaaggacagtattccatgcctcaatgtgaagacacggccagtgcgaatgcctccaggatatcaagcagaacttgttattcaattggtgtgggtagatggtgaacctccacaacagattactagtcttgctgtaagctcagcatatggaatagttgcatttgggaactgcaatgggttggctgtggtggattttatacagaagacagtactgttaagcatggggaccattgacctatatagatcaagtgacttataccagcgacaaccacggtctcctcgaaaaaacaaacagttcattgcagacaacttttgcatgcgtggcctgtctaacttttatcctgatttaacgaaacggatccgtacttcctatcagagtttaactgaactgaatgacagtccagttcccctagaacttgagcgctgcaagtctcctacctcagaccatgtaaatggacactgcacaagtccaacttctcagagttgcagttctggaaaacgtctttctagtgccgatgtttcaaaagtaaatcgctggggtcctggaagaccaccatttcgaaaggcccagtcagcagcctgcatggagatttctttaccagttacaacagaagaaaaccgagaaaattcctataatcgttctagaagctctagtatctccagtattgacaaagattctaaagaagcaattacagcactatacttcatggactcctttgcacggaaaaatgactctaccatctctccttgtctgttcgttggaaccagtctgggaatggtgttaatcatctccttaaacctaccattagcagatgaacaaaggtttacagagccagtcatggtattgccaagtggtacattcctctcattgaaaggagctgtgctaacattctcctgtatggaccgaatgggtggattaatgcaaccgccatatgaagtttggagggatccaaacaacatagatgaaaatgaaaaatcttggagaaggaaagtggtaatgaactcatcttctgcatcccaagaaataggagatcatcagtatacaataatctgctcagaaaaacaagccaaagtcttctcactgccttctcagacttgcctttatgttcataacatcacggagacatcttttatactgcaagcaaatgtggtggtcatgtgtagcagtgcctgcttggcatgcttttgtgctaacggacatatcatgataatgagcctacctagtcttcgcccaatgttggatgttaattatttgccactgacagacatgaggatagcacgaacattttgttttaccaatgaaggacaggcattatacctcgtctctcctactgaaattcagcggttaacatacagccaagaaatgtgtgataatctacaggacatgctaggagatttgtttactcccatagagacaccagaagctcaaaacagaggctttctcaagggactgtttggtggaagcggacaaacatttgacagagaagagctctttggggaagcttcggcaggaaaagcatcccgcagccttgcgcaacacattcctggaccaggtagtatagaagggatgaaaggcgctgctggaggggtgatgggagagctgacccgtgcacggattgcacttgatgaaagaggacagaggctaggagagctggaagagaaaactgcaggcatgatgaccagtgcagaagcattttccaaacatgcacatgagttaatgctgaaatacaaggataagaaatggtaccaattctgacttctaaagaagctgtgactgctttgagaaaccatattcagggaaaccaaatttattcccagcatcactactcaactgctagaagccagtttcttctacaaaatgttccatttacagtcaatctgaaattttcataaaagagatgtatcagagacactgtgcaacccaaaggctggagccctggttaaaatcccaaaatacggctgaatttgccttttcccatgtggaatggagctatcatcttggcatgtcattcgataaggatttatatttagtaactacggggagtcctcttgatttgaaaattcctgtacaaacaaaagcattaatgcacttaatgaaaaaaaatctttgcatgataaattaacatcttaagggga

SEQ ID NO: 6 - DNA, 4293 bp, Homo sapiens
acactttcaggctctgatcgcggccgcagtttttccttttttcttctgccgtcgccttctctgcctcttctcatcctttctcgctctgctgctctgcagtgtgacgagtccgaatcctcttcccacccagcccgcgcctttcttcttttgcctgcgctgttctatttctccttcggccgccgccgccactgctgcacacagctggtgtcggtgccgcgcttttacccccaagtcgttcccgcagcctatggcccaggccgccttgggtatttctgctcaaggtaaccacatccctctttaaaaattccgccgaaaaagagaagacgctttacccgactctttgggccgttatctcacggcgaactttctgaccaagtatacaactacccagagggcctaggagaagtgctgtatagagagcagttcgacttcaacgctgagccaccttgggaacctagctgatgataggggggttccatctcccaacttgtccatggaggtcttcacttcagaaatccaagactcatattcatccagcttggtgtcaagtgggctgttgctgccagaattatcttgtgattatttgagagatgtatcagtttcttctgaagtacaatcaactgtagaagcctttgtagcagtttgttgcatattctaaggacccagacataggcttggtggcccgtctcttgtctttcctggtttatgactttcggctttgtggaatacggctgagatgaaaggatttattgatgatgcaaactactccgttggcctgttggatgaaggaacaaaccttggaaatgttattgataactatgtttatgaacataccctgacagggaaaaatgcattttttgtgggagatcttggaaagattgtgaagaaacacagtcaatggcagaatgtagtggctcagataaagccattctacacagtgaagtgcaactctgctccagctgtacttgagattttggcagctcttggaaccggatttgcttgttccagtaaaaatgaaatggctttagtgcaagagttgggtgtacctccagaaaacattatttacataagtccttgcaagcaagtgtctcagataaagtatgcagcaaaagttggagtgaatatcctgacatgtgacaatgaaattgaattgaagaaaattgcacgtaatcacccaaatgccaaggtcttactacatattgcaacagaagataatattggaggtgaagagggtaacatgaagtttggcactaccctgaagaactgtaggcatctcttggaatgtgctaaggaacttgatgtccaaataattggggttaaatttcatgtttcgagtgcttgcaaagaatctcaagtatatgtacatgctctatctgatgctcgatgtgtgtttgacatggctggagaaattggctttacgatgaacatgttagacattggtggaggattcacgggaactgaatttcaattggaagaggttaatcatgttatcagccctctgttggatatctactttcctgaaggatctggtgttaagataatttcagaacccggaagctactatgtgtcttctgcatttacactcgcagttaatatcatagcaaagaaagttgttgaaaatgataaatttccctctggagtagaaaaaaccggaagtgatgaaccagccttcatgtattatatgaatgatggtgtttatggttcttttgcaagtaaactgtctgaggacttaaataccattccagaggttcacaagaaatacaaggaagatgagcctctgtttacaagcagcctttggggtccatcctgtgatgagcttgatcaaattgtggaaagctgtcttcttcctgagctgaatgtgggagattggcttatctttgataacatgggagcagattctttccatgaaccatctgcttttaatgattttcagaggccagccatttattacatgatgtcattcagtgattggtatgagatgcaagatgctggaattacttcagactcaatgatgaagaacttcttctttgtgccttcttgcattcagctgagccaagaagacagcttttccgctgaagcttaaacaggcattaacgcttctttagatctgaagttgcaggttaagcttgtctggtcaacattccagtgtggaaaaataatttaaacaatcttattctcttaattcttttggcaacaaaaactattagtaatagctatttgggaccagacaaaatcagctttcatctataattcattggggataatgggagatttagataatgtatccagatttaaacctaccagtttgtcctaccccttaagcgtttaaaataaaatatgcaacaaaatggatgacttagtggagatggaagcccattaattgggttccccattaaatcgtttacatacaagaacacagtttttatactaaggatttgtgtttaaagtcttgtaaagttcatgtctttcacccagatatatcaaatgttagaagaccagtgtgacttcattagataacgtttagtgtatttagaatgtgtaaatttgtgctttgaactgtagtttaataaatgtaaaattgcatcatagtatttgttgacctaatgtaacccttgtatgattgcaataaaattttgtgtagattttactgttttttcaggctaaaactttgggaaaggggctagctagcaaaggtagttttgaaatagatgtgtatatggactgttttgaagggtttttttctttatagcccagttaagttttgtttggctcggtgcatttttcatttatttaattagtaatttaagtaaagtgtttggtaaatcattgtgaagttcagattcattatggagagttgatgtgcagtaagcatgatgtttaacaattttaacaccaaaaatgttaatcctgcataaatcaactgtaataataaataggtgtttctgtatagatagaatgcatagagtaccttagtaaatctttgaatcacaatcttttggctgaaatggaagattctgttaaatactttgaataaacttggggggagggaaataaaattgcagaaaactgcagagcactaaaacttaaagaagggctacatctttatccagaaacctgttgctcttttgcacggaatgtttaaattcagagttgggatgggggttggggtgaagcacacttattatcttcagttgcagtgatttcaaatttaggattttttgttgttggtttgaactgtccccttagtttcttgttatttccaatttgttctgcttagtcattacttttaattcttttcttactaaaattttatggtggttgggggaagggagttagcatcactaacctgacagttgttgccaggaatttgctttgtttactgctagtatattagaaatcctagatctcagaatcacaatagtaataaacaacaggggtcattttttcctaacttactctgtgttcaggtgtggaatttctgtctcccaagaggaaatgtgacttcactttggtgccaatggacagaaaattctacctgtgctacataggagaagtttggaatgcacttaatagctggtttttacaccttgatttcgaggtggaaagaaattgatcatgaatctctaataaatttaaatctcttaaaccagtaggtgcttaatattttttgatttgattaatgcccatttaaatctcatgggttctattaaaaatatatatatatagggccccaatccattgccatcaaattgcccttggacttttccaaggtatattatggggttttatgcaaaattccaagctaccatgtaactttttttaaccatttaacaaggagggggaactgtttcctaccttctttacatgttgtgcattgttgtggtccagaaatgccaaacctttttaaagatggtgcaactttgagtccttggcttgactatacaggccttgaacttcatggcatatcaactttgccatatctgcaggagagctgttctataagaaatagctcagagttgcaaatatcacatgtgaatgatacggtaacttttaagaaatgtctgtattgtatttgaagactgtttgccataaatctgaaatttgaacctatgtatttcaatttggtatgctaaaaagttctgaattaatgtaaagttttttgttataatattgtaatctcagttcaaaagttaactgcaaatataaaacccaatgatttctatatagtaaattgaactgtaaaggtaacttgtgtgtgattctgaatacatagataaatgtttttattcctca

SEQ ID NO: 7 - DNA, 4019 bp, Homo sapiens
acactttcaggctctgatcgcggccgcagtttttccttttttcttctgccgtcgccttctctgcctcttctcatcctttctcgctctgctgctctgcagtgtgacgagtccgaatcctcttcccacccagcccgcgcctttcttcttttgcctgcgctgttctatttctccttcggccgccgccgccactgctgcacacagctggtgtcggtgccgcgcttttacccccaagtcgttcccgcagcctatggcccaggccgccttgggtatttctgctcaaggtaaccacatccctctttaaaaattccgccgaaaaagagaagacgctttacccgactctttgggccgttatctcacggcgaactttctgaccaagtatacaactacccagagggcctaggagaagtgctgtatagagagcagttcgacttcaacgctgagccaccttgggaacctagctgatgataggggggttccatctcccaacttgtccatggaggtcttcacttcagaaatccaagactcatattcatccagcttggtgtcaagtgggctgttgctgccagaattatcttgtgattatttgagagatgtatcagtttcttctgaagtacaatcaactgtagaagcctttgtagcagtttgttgcatattctaaggacccagacataggcttggtggcccgtctcttgtctttcctggtttatgactttcggctttgtggaatacggctgagatgaaaggatttattgatgatgcaaactactccgttggcctgttggatgaaggaacaaaccttggaaatgttattgataactatgtttatgaacataccctgacagggaaaaatgcattttttgtgggagatcttggaaagattgtgaagaaacacagtcaatggcagaatgtagtggctcagataaagccattctacacagtgaagtgcaactctgctccagctgtacttgagattttggcagctcttggaaccggatttgcttgttccagtaaaaatgaaatggctttagtgcaagagttgggtgtacctccagaaaacattatttacataagtccttgcaagcaagtgtctcagataaagtatgcagcaaaagttggagtgaatatcctgacatgtgacaatgaaattgaattgaagaaaattgcacgtaatcacccaaatgccaaggtcttactacatattgcaacagaagataatattggaggtgaagagggtaacatgaagtttggcactaccctgaagaactgtaggcatctcttggaatgtgctaaggaacttgatgtccaaataattggggttaaatttcatgtttcgagtgcttgcaaagaatctcaagtatatgtacatgctctatctgatgctcgatgtgtgtttgacatggctggagaaattggctttacgatgaacatgttagacattggtggaggattcacgggaactgaatttcaattggaagaggttaatcatgttatcagccctctgttggatatctactttcctgaaggatctggtgttaagataatttcagaacccggaagctactatgtgtcttctgcatttacactcgcagttaatatcatagcaaagaaagttgttgaaaatgataaatttccctctggagtagaaaaaaccggaagtgatgaaccagccttcatgtattatatgaatgatggtgtttatggttcttttgcaagtaaactgtctgaggacttaaataccattccagaggttcacaaggcaaaaatacaaggaagatgagcctctgtttacaagcagcctttggggtccatcctgtgatgagcttgatcaaattgtggaaagctgtcttcttcctgagctgaatgtgggagattggcttatctttgataacatgggagcagattctttccatgaaccatctgcttttaatgattttcagaggccagccatttattacatgatgtcattcagtgattggtatgagatgcaagatgctggaattacttcagactcaatgatgaagaacttcttctttgtgccttcttgcattcagctgagccaagaagacagcttttccgctgaagcttaaacaggcattaacgcttctttagatctgaagttgcaggttaagcttgtctggtcaacattccagtgtggaaaaataatttaaacaatcttattctcttaattcttttggcaacaaaaactattagtaatagctatttgggaccagacaaaatcagctttcatctataattcattggggataatgggagatttagataatgtatccagatttaaacctaccagtttgtcctaccccttaagcgtttaaaataaaatatgcaacaaaatggatgacttagtggagatggaagcccattaattgggttccccattaaatcgtttacatacaagaacacagtttttatactaaggatttgtgtttaaagtcttgtaaagttcatgtctttcacccagatatatcaaatgttagaagaccagtgtgacttcattagataacgtttagtgtatttagaatgtgtaaatttgtgctttgaactgtagtttaataaatgtaaaattgcatcatagtatttgttgacctaatgtaacccttgtatgattgcaataaaattttgtgtagattttactgttttttcaggctaaaactttgggaaaggggctagctagcaaaggtagttttgaaatagatgtgtatatggactgttttgaagggtttttttctttatagcccagttaagttttgtttggctcggtgcatttttcatttatttaattagtaatttaagtaaagtgtttggtaaatcattgtgaagttcagattcattatggagagttgatgtgcagtaagcatgatgtttaacaattttaacaccaaaaatgttaatcctgcataaatcaactgtaataataaataggtgtttctgtatagatagaatgcatagagtaccttatttcttgttatttccaatttgttctgcttagtcattacttttaattcttttcttactaaaattttatggtggttgggggaagggagttagcatcactaacctgacagttgttgccaggaatttgctttgtttactgctagtatattagaaatcctagatctcagaatcacaatagtaataaacaacaggggtcattttttcctaacttactctgtgttcaggtgtggaatttctgtctcccaagaggaaatgtgacttcactttggtgccaatggacagaaaattctacctgtgctacataggagaagtttggaatgcacttaatagctggtttttacaccttgatttcgaggtggaaagaaattgatcatgaatctctaataaatttaaatctcttaaaccagtaggtgcttaatattttttgatttgattaatgcccatttaaatctcatgggttctattaaaaatatatatatatagggccccaatccattgccatcaaattgcccttggacttttccaaggtatattatggggttttatgcaaaattccaagctaccatgtaactttttttaaccatttaacaaggagggggaactgtttcctaccttctttacatgttgtgcattgttgtggtccagaaatgccaaacctttttaaagatggtgcaactttgagtccttggcttgactatacaggccttgaacttcatggcatatcaactttgccatatctgcaggagagctgttctataagaaatagctcagagttgcaaatatcacatgtgaatgatacggtaacttttaagaaatgtctgtattgtatttgaagactgtttgccataaatctgaaatttgaacctatgtatttcaatttggtatgctaaaaagttctgaattaatgtaaagttttttgttataatattgtaatctcagttcaaaagttaactgcaaatataaaacccaatgatttctatatagtaaattgaactgtaaaggtaacttgtgtgtgattctgaatacatagataaatgtttttattc

SEQ ID NO: 8 - DNA, 4147 bp, Homo sapiens
acactttcaggctctgatcgcggccgcagtttttccttttttcttctgccgtcgccttctctgcctcttctcatcctttctcgctctgctgctctgcagtgtgacgagtccgaatcctcttcccacccagcccgcgcctttcttcttttgcctgcgctgttctatttctccttcggccgccgccgccactgctgcacacagctggtgtcggtgccgcgcttttacccccaagtcgttcccgcagcctatggcccaggccgccttgggtatttctgctcaaggtaaccacatccctctttaaaaattccgccgaaaaagagaagacgctttacccgactctttgggccgttatctcacggcgaactttctgaccaagtatacaactacccagagggcctaggagaagtgctgtatagagagcagttcgacttcaacgctgagccaccttgggaacctagctgatgataggggggttccatctcccaacttgtccattttgttgcatattctaaggacccagacataggcttggtggcccgtctcttgtctttcctggtttatgactttcggctttgtggaatacggctgagatgaaaggatttattgatgatgcaaactactccgttggcctgttggatgaaggaacaaaccttggaaatgttattgataactatgtttatgaacataccctgacagggaaaaatgcattttttgtgggagatcttggaaagattgtgaagaaacacagtcaatggcagaatgtagtggctcagataaagccattctacacagtgaagtgcaactctgctccagctgtacttgagattttggcagctcttggaaccggatttgcttgttccagtaaaaatgaaatggctttagtgcaagagttgggtgtacctccagaaaacattatttacataagtccttgcaagcaagtgtctcagataaagtatgcagcaaaagttggagtgaatatcctgacatgtgacaatgaaattgaattgaagaaaattgcacgtaatcacccaaatgccaaggtcttactacatattgcaacagaagataatattggaggtgaagagggtaacatgaagtttggcactaccctgaagaactgtaggcatctcttggaatgtgctaaggaacttgatgtccaaataattggggttaaatttcatgtttcgagtgcttgcaaagaatctcaagtatatgtacatgctctatctgatgctcgatgtgtgtttgacatggctggagaaattggctttacgatgaacatgttagacattggtggaggattcacgggaactgaatttcaattggaagaggttaatcatgttatcagccctctgttggatatctactttcctgaaggatctggtgttaagataatttcagaacccggaagctactatgtgtcttctgcatttacactcgcagttaatatcatagcaaagaaagttgttgaaaatgataaatttccctctggagtagaaaaaaccggaagtgatgaaccagccttcatgtattatatgaatgatggtgtttatggttcttttgcaagtaaactgtctgaggacttaaataccattccagaggttcacaagaaatacaaggaagatgagcctctgtttacaagcagcctttggggtccatcctgtgatgagcttgatcaaattgtggaaagctgtcttcttcctgagctgaatgtgggagattggcttatctttgataacatgggagcagattctttccatgaaccatctgcttttaatgattttcagaggccagccatttattacatgatgtcattcagtgattggtatgagatgcaagatgctggaattacttcagactcaatgatgaagaacttcttctttgtgccttcttgcattcagctgagccaagaagacagcttttccgctgaagcttaaacaggcattaacgcttctttagatctgaagttgcaggttaagcttgtctggtcaacattccagtgtggaaaaataatttaaacaatcttattctcttaattcttttggcaacaaaaactattagtaatagctatttgggaccagacaaaatcagctttcatctataattcattggggataatgggagatttagataatgtatccagatttaaacctaccagtttgtcctaccccttaagcgtttaaaataaaatatgcaacaaaatggatgacttagtggagatggaagcccattaattgggttccccattaaatcgtttacatacaagaacacagtttttatactaaggatttgtgtttaaagtcttgtaaagttcatgtctttcacccagatatatcaaatgttagaagaccagtgtgacttcattagataacgtttagtgtatttagaatgtgtaaatttgtgctttgaactgtagtttaataaatgtaaaattgcatcatagtatttgttgacctaatgtaacccttgtatgattgcaataaaattttgtgtagattttactgttttttcaggctaaaactttgggaaaggggctagctagcaaaggtagttttgaaatagatgtgtatatggactgttttgaagggtttttttctttatagcccagttaagttttgtttggctcggtgcatttttcatttatttaattagtaatttaagtaaagtgtttggtaaatcattgtgaagttcagattcattatggagagttgatgtgcagtaagcatgatgtttaacaattttaacaccaaaaatgttaatcctgcataaatcaactgtaataataaataggtgtttctgtatagatagaatgcatagagtaccttagtaaatctttgaatcacaatcttttggctgaaatggaagattctgttaaatactttgaataaacttggggggagggaaataaaattgcagaaaactgcagagcactaaaacttaaagaagggctacatctttatccagaaacctgttgctcttttgcacggaatgtttaaattcagagttgggatgggggttggggtgaagcacacttattatcttcagttgcagtgatttcaaatttaggattttttgttgttggtttgaactgtccccttagtttcttgttatttccaatttgttctgcttagtcattacttttaattcttttcttactaaaattttatggtggttgggggaagggagttagcatcactaacctgacagttgttgccaggaatttgctttgtttactgctagtatattagaaatcctagatctcagaatcacaatagtaataaacaacaggggtcattttttcctaacttactctgtgttcaggtgtggaatttctgtctcccaagaggaaatgtgacttcactttggtgccaatggacagaaaattctacctgtgctacataggagaagtttggaatgcacttaatagctggtttttacaccttgatttcgaggtggaaagaaattgatcatgaatctctaataaatttaaatctcttaaaccagtaggtgcttaatattttttgatttgattaatgcccatttaaatctcatgggttctattaaaaatatatatatatagggccccaatccattgccatcaaattgcccttggacttttccaaggtatattatggggttttatgcaaaattccaagctaccatgtaactttttttaaccatttaacaaggagggggaactgtttcctaccttctttacatgttgtgcattgttgtggtccagaaatgccaaacctttttaaagatggtgcaactttgagtccttggcttgactatacaggccttgaacttcatggcatatcaactttgccatatctgcaggagagctgttctataagaaatagctcagagttgcaaatatcacatgtgaatgatacggtaacttttaagaaatgtctgtattgtatttgaagactgtttgccataaatctgaaatttgaacctatgtatttcaatttggtatgctaaaaagttctgaattaatgtaaagttttttgttataatattgtaatctcagttcaaaagttaactgcaaatataaaacccaatgatttctatatagtaaattgaactgtaaaggtaacttgtgtgtgattctgaatacatagataaatgtttttattcctca

SEQ ID NO: 9 - DNA, 4172 bp, Homo sapiens
gaaagagagcgatagagtgcgagagcgagtgcccggagcatcctggccctgagacagctgggccagccccgcagggctctgcagcatgtgggagctccgctccatagccttctccagggctgtgttcgcagagttcctggccacactcctcttcgtcttctttggcctcggctctgccctcaactggccacaggccctgccctctgtgctacagattgccatggcgtttggcttgggtattggcaccctggtacaggctctgggccacataagcggggcccacatcaaccctgccgtgactgtggcctgcctggtgggctgccacgtctccgttctccgagccgccttctacgtggctgcccagctgctgggggctgtggccggagccgctctgctccatgagatcacgccagcagacatccgcggggacctggctgtcaatgctctcagcaacagcacgacggctggccaggcggtgactgtggagctcttcctgacactgcagctggtgctctgcatcttcgcctccaccgatgagcgccgcggagagaacccgggcacccctgctctctccataggcttctctgtggccctgggccacctccttgggatccattacaccggctgctctatgaatcctgcccgctccctggctccagctgtcgtcactggcaaatttgatgaccactgggtcttctggatcggacccctggtgggcgccatcctgggctccctcctctacaactacgtgctgtttccgccagccaagagcctgtcggagcgcctggcagtgctgaagggcctggagccggacaccgattgggaggagcgcgaggtgcgacggcggcagtcggtggagctgcactcgccgcagagcctgccacggggtaccaaggcctgagggccgccagcggcctctacggccccgacggacgcttgtgaggcccgaggcagaagggcccaccccgtccctcctctcccgcaggtctgaagttggccccccagcgcagagtagctgcttcctggacgtgcgcgcccaggccagtgctgtgagcaggcggggaggaggctgccggagggagccctgagcctggcaggtcccctgccctgaggctgtgagcagctagtggtggcttctccagcctttttcagggaactgggaacttaggggactgagctggggagggaggcaggtgggtggtaagagggaaactctggagagcctgcacccaggtactgagtggggagtgtacagacccctgccttgggggttccgggaatgatgcaactggttttactagtgtgcaagtgtgttcatccccaagttctcttttgtcctcacatgcagagttgtgcatgcccctgagtgtgaacaggtttgcctacgttggtgcaagtgtgcatggctggggacttctcacttccccttgcaccccttcctccccaacctgcaataaatccgcttctcctgcagtggatgagtgtgggtgccagtcctcctcaggagaaggggaagggaaggaggccactttgagagggctgaagggagggccttgatttccagccgcaatctggctcctcctggaaaatttcccccacctgcagcgctgggccccaaggcttgccaagactcattgctggaggtagagaggtgtcaaccagagaacagctcccctagacatggcctctggaaaaaggaaatctttggtggccaaagatttcctttctgtggtgagggagaacctctccaaagaggaagcaggcatatgagtgcgcacgccttcacgtgtgtgtatgctgtgtgtgcccgggacccccgtctccaggggtgccccagacccagagattagcctcccacttcggcgcagaaaacaaaagccctttgtgggacccgggcctttgtcttgggtgaggggagatttgcacctagacacttcttgaaaggagacactcagtttcacaagtgagccctcttgcccagcacacacctatggctggctgggcaaggcgctcaggcatgcaaccatgggcaccaggcaatacccatccatcacccatctcactctccccagtcctcaggcagcagcttttccaccccaggaatctctgttccttctctgtctgcctctccacagcccgtgatcccctgcttctggctcctaccactggacagtcattgtggatagagcagcctgctgctctcaggaccagagaagggaaatgacttctccaggcagaggcagatctgagtctagaacccaggcttctaaatttctaggccagtactactgctctcaaaagagattaactgggattaagtgagatgacgcatgtaaagatgctgtgtaaactgtaattcttaataccattatcacgcattactagaatcatttcattatttctgcttcctgggggaaggatgcagaaggagtctgatgctcaacatcccttacctcctttcgctgatggccaaagcaaaggagagtcctgggagcccacaagatccaggcagaaggagatgggtttggggctggccccatcctggcccagcctcttaacctcttcttaccctgaatgtgtgccctatcttttctcccacctccttcctcctaccacccagccctatccattctctccttccctctccagcctgctgtataagtaacatgtgggtcataccttgaacccccctccgcccccatgctctctgtggcctccatgccttcaagacttctgtctgtatctatctcacactgcaccaagcacccactgtgcaccaggcactaagtctctagcctctttctcccttctgctcccatccaagaaagacagtgtataaggaacatctctgtaattgtgtcccctctcatctatgctctttcctgtcttccttgaccaaagctctctttgaggtccaaaaaaggctgccctgggccatatgtgctatggagaggactctcccaaacccccaatagctagtgacagccacttggcctcactaccagaagaagggtggagtcagaaaccaaagtgacctccagagctgtcctcctggcacctgagtgtccttgctctagaggttcaaaggcagcaaggcagtgagctatgagcccagcatggatgtgtctcaggcacctcatccccaccccacctcaccccaacaaactcctctagaagaagccaagaatttctctctatgtctgtttcactttttggattgcatctccccaaaaactaaatgtgaaatccctaccatttctagcctctattgcccagattggagtcagaggtcaaaaaaggattccaagtgatggaactccaggggtggagggaaattggcagttcctggcatctcttgtgtaccagctgctgtgctgggtgccttgcatgcacgggcttatctgatcttcctcaaacttcagataggttagggaaggacaaaggcccccagccatgaagggttttgctatttccaaagcttccccttatcgtcccctgtgattatctcccaaccccgtgacaaaggtagagcaaatattgttcttcccattttacagattcagaaaccaaggctaagggactggtctaaagtctcacaggtagtatatggtggagccaacacttgaactcagacctttttacacaaaatcccatgatttttccactgagacaaatcctaggctcctgggaggccctggcagaagccagaacacatggctgggcctttccagcccaacccactgtcttgcagtggacggagagccttggcgagggcagcagggtagagaggacaaagaatgtggggctggtttctgccctttaagagcacccggtcagtcagagaacagagatcacacacaccaaaccagacagaggcagggcagcatggagacaggtagacagacctccaggtccctaagctggggacagagaaggttctgagctgtcccatactcccactttgtgccaaatgactttgcacctgcaaatggtgcttcaatgtcgttttgtatctttaagctgtgatgttgtatatatacaatgcctcccagctagactgtaagccctttggggacaagggctgcttccagttcttggatggcgttctcctatctaccttccttcaactgctctgcatataataagcactcaataaatgctcatttgccaat

SEQ ID NO: 10 - DNA, 5506 bp, Homo sapiens
ctgtgacaaaagagataactattagagaaacaaaagtccagaatgctaaggttgccgctttcacttcctctcaccctttagcccagaactgctttgaatacaccaattgctgtggggcggctcgaggaagagaagacaccagtgcctcagaaactgctcggtcagacggtgatagcgagccacgcattcacagggccactgctgctcacagaagcagtgaggatgatgccaggatgatgtctgcctcgcgcctggctgggactctgatcccagccatggccttcctctcctgcgtgagaccagaaagctgggagccctgcgtggaggtggttcctaatattacttatcaatgcatggagctgaatttctacaaaatccccgacaacctccccttctcaaccaagaacctggacctgagctttaatcccctgaggcatttaggcagctatagcttcttcagtttcccagaactgcaggtgctggatttatccaggtgtgaaatccagacaattgaagatggggcatatcagagcctaagccacctctctaccttaatattgacaggaaaccccatccagagtttagccctgggagccttttctggactatcaagtttacagaagctggtggctgtggagacaaatctagcatctctagagaacttccccattggacatctcaaaactttgaaagaacttaatgtggctcacaatcttatccaatctttcaaattacctgagtatttttctaatctgaccaatctagagcacttggacctttccagcaacaagattcaaagtatttattgcacagacttgcgggttctacatcaaatgcccctactcaatctctctttagacctgtccctgaaccctatgaactttatccaaccaggtgcatttaaagaaattaggcttcataagctgactttaagaaataattttgatagtttaaatgtaatgaaaacttgtattcaaggtctggctggtttagaagtccatcgtttggttctgggagaatttagaaatgaaggaaacttggaaaagtttgacaaatctgctctagagggcctgtgcaatttgaccattgaagaattccgattagcatacttagactactacctcgatgatattattgacttatttaattgtttgacaaatgtttcttcattttccctggtgagtgtgactattgaaagggtaaaagacttttcttataatttcggatggcaacatttagaattagttaactgtaaatttggacagtttcccacattgaaactcaaatctctcaaaaggcttactttcacttccaacaaaggtgggaatgctttttcagaagttgatctaccaagccttgagtttctagatctcagtagaaatggcttgagtttcaaaggttgctgttctcaaagtgattttgggacaaccagcctaaagtatttagatctgagcttcaatggtgttattaccatgagttcaaacttcttgggcttagaacaactagaacatctggatttccagcattccaatttgaaacaaatgagtgagttttcagtattcctatcactcagaaacctcatttaccttgacatttctcatactcacaccagagttgctttcaatggcatcttcaatggcttgtccagtctcgaagtcttgaaaatggctggcaattctttccaggaaaacttccttccagatatcttcacagagctgagaaacttgaccttcctggacctctctcagtgtcaactggagcagttgtctccaacagcatttaactcactctccagtcttcaggtactaaatatgagccacaacaacttcttttcattggatacgtttccttataagtgtctgaactccctccaggttcttgattacagtctcaatcacataatgacttccaaaaaacaggaactacagcattttccaagtagtctagctttcttaaatcttactcagaatgactttgcttgtacttgtgaacaccagagtttcctgcaatggatcaaggaccagaggcagctcttggtggaagttgaacgaatggaatgtgcaacaccttcagataagcagggcatgcctgtgctgagtttgaatatcacctgtcagatgaataagaccatcattggtgtgtcggtcctcagtgtgcttgtagtatctgttgtagcagttctggtctataagttctattttcacctgatgcttcttgctggctgcataaagtatggtagaggtgaaaacatctatgatgcctttgttatctactcaagccaggatgaggactgggtaaggaatgagctagtaaagaatttagaagaaggggtgcctccatttcagctctgccttcactacagagactttattcccggtgtggccattgctgccaacatcatccatgaaggtttccataaaagccgaaaggtgattgttgtggtgtcccagcacttcatccagagccgctggtgtatctttgaatatgagattgctcagacctggcagtttctgagcagtcgtgctggtatcatcttcattgtcctgcagaaggtggagaagaccctgctcaggcagcaggtggagctgtaccgccttctcagcaggaacacttacctggagtgggaggacagtgtcctggggcggcacatcttctggagacgactcagaaaagccctgctggatggtaaatcatggaatccagaaggaacagtgggtacaggatgcaattggcaggaagcaacatctatctgaagaggaaaaataaaaacctcctgaggcatttcttgcccagctgggtccaacacttgttcagttaataagtattaaatgctgccacatgtcaggccttatgctaagggtgagtaattccatggtgcactagatatgcagggctgctaatctcaaggagcttccagtgcagagggaataaatgctagactaaaatacagagtcttccaggtgggcatttcaaccaactcagtcaaggaacccatgacaaagaaagtcatttcaactcttacctcatcaagttgaataaagacagagaaaacagaaagagacattgttcttttcctgagtcttttgaatggaaattgtattatgttatagccatcataaaaccattttggtagttttgactgaactgggtgttcactttttcctttttgattgaatacaatttaaattctacttgatgactgcagtcgtcaaggggctcctgatgcaagatgccccttccattttaagtctgtctccttacagaggttaaagtctagtggctaattcctaaggaaacctgattaacacatgctcacaaccatcctggtcattctcgagcatgttctattttttaactaatcacccctgatatatttttatttttatatatccagttttcatttttttacgtcttgcctataagctaatatcataaataaggttgtttaagacgtgcttcaaatatccatattaaccactatttttcaaggaagtatggaaaagtacactctgtcactttgtcactcgatgtcattccaaagttattgcctactaagtaatgactgtcatgaaagcagcattgaaataatttgtttaaagggggcactcttttaaacgggaagaaaatttccgcttcctggtcttatcatggacaatttgggctagaggcaggaaggaagtgggatgacctcaggaggtcaccttttcttgattccagaaacatatgggctgataaacccggggtgacctcatgaaatgagttgcagcagaagtttatttttttcagaacaagtgatgtttgatggacctctgaatctctttagggagacacagatggctgggatccctcccctgtacccttctcactgccaggagaactacgtgtgaaggtattcaaggcagggagtatacattgctgtttcctgttgggcaatgctccttgaccacattttgggaagagtggatgttatcattgagaaaacaatgtgtctggaattaatggggttcttataaagaaggttcccagaaaagaatgttcatccagcctcctcagaaacagaacattcaagaaaaggacaatcaggatgtcatcagggaaatgaaaataaaaaccacaatgagatatcaccttataccaggtagaatggctactataaaaaaatgaagtgtcatcaaggatatagagaaattggaacccttcttcactgctggagggaatggaaaatggtgtagccgttatgaaaaacagtacggaggtttctcaaaaattaaaaatagaactgctatatgatccagcaatctcacttctgtatatatacccaaaataattgaaatcagaatttcaagaaaatatttacactcccatgttcattgtggcactcttcacaatcactgtttccaaagttatggaaacaacccaaatttccattgaaaaataaatggacaaagaaaatgtgcatatacgtacaatgggatattattcagcctaaaaaaagggggaatcctgttatttatgacaacatgaataaacccggaggccattatgctatgtaaaatgagcaagtaacagaaagacaaatactgcctgatttcatttatatgaggttctaaaatagtcaaactcatagaagcagagaatagaacagtggttcctagggaaaaggaggaagggagaaatgaggaaatagggagttgtctaattggtataaaattatagtatgcaagatgaattagctctaaagatcagctgtatagcagagttcgtataatgaacaatactgtattatgcacttaacattttgttaagagggtacctctcatgttaagtgttcttaccatatacatatacacaaggaagcttttggaggtgatggatatatttattaccttgattgtggtgatggtttgacaggtatgtgactatgtctaaactcatcaaattgtatacattaaatatatgcagttttataatatcaattatgtctgaatgaagctataaaaaagaaaagacaacaaaattcagttgtcaaaactggaaatatgaccacagtcagaagtgtttgttactgagtgtttcagagtgtgtttggtttgagcaggtctagggtgattgaacatccctgggtgtgtttccatgtctcatgtactagtgaaagtagatgtgtgcatttgtgcacatatccctatgtatccctatcagggctgtgtgtatttgaaagtgtgtgtgtccgcatgatcatatctgtatagaagagagtgtgattatatttcttgaagaatacatccatttgaaatggatgtctatggctgtttgagatgagttctctactcttgtgcttgtacagtagtctccccttatcccttatgcttggtggatacgttcttagaccccaagtggatctctgagaccgcagatggtaccaaacctcatatatgcaatattttttcctatacataaatacctaagataaagttcatcttctgaattaggcacagtaagagattaa

SEQ ID NO: 11 - DNA, 5626 bp, Homo sapiens
ctgtgacaaaagagataactattagagaaacaaaagtccagaatgctaaggttgccgctttcacttcctctcaccctttagcccagaactgctttgaatacaccaattgctgtggggcggctcgaggaagagaagacaccagtgcctcagaaactgctcggtcagacggtgatagcgagccacgcattcacagggccactgctgctcacagaagcagtgaggatgatgccaggatgatgtctgcctcgcgcctggctgggactctgatcccagccatggccttcctctcctgcgtgagaccagaaagctgggagccctgcgtggagacttggccctaaaccacacagaagagctggcatgaaacccagagctttcagactccggagcctcagcccttcaccccgattccattgcttcttgctaaatgctgccgttttatcacggaggtggttcctaatattacttatcaatgcatggagctgaatttctacaaaatccccgacaacctccccttctcaaccaagaacctggacctgagctttaatcccctgaggcatttaggcagctatagcttcttcagtttcccagaactgcaggtgctggatttatccaggtgtgaaatccagacaattgaagatggggcatatcagagcctaagccacctctctaccttaatattgacaggaaaccccatccagagtttagccctgggagccttttctggactatcaagtttacagaagctggtggctgtggagacaaatctagcatctctagagaacttccccattggacatctcaaaactttgaaagaacttaatgtggctcacaatcttatccaatctttcaaattacctgagtatttttctaatctgaccaatctagagcacttggacctttccagcaacaagattcaaagtatttattgcacagacttgcgggttctacatcaaatgcccctactcaatctctctttagacctgtccctgaaccctatgaactttatccaaccaggtgcatttaaagaaattaggcttcataagctgactttaagaaataattttgatagtttaaatgtaatgaaaacttgtattcaaggtctggctggtttagaagtccatcgtttggttctgggagaatttagaaatgaaggaaacttggaaaagtttgacaaatctgctctagagggcctgtgcaatttgaccattgaagaattccgattagcatacttagactactacctcgatgatattattgacttatttaattgtttgacaaatgtttcttcattttccctggtgagtgtgactattgaaagggtaaaagacttttcttataatttcggatggcaacatttagaattagttaactgtaaatttggacagtttcccacattgaaactcaaatctctcaaaaggcttactttcacttccaacaaaggtgggaatgctttttcagaagttgatctaccaagccttgagtttctagatctcagtagaaatggcttgagtttcaaaggttgctgttctcaaagtgattttgggacaaccagcctaaagtatttagatctgagcttcaatggtgttattaccatgagttcaaacttcttgggcttagaacaactagaacatctggatttccagcattccaatttgaaacaaatgagtgagttttcagtattcctatcactcagaaacctcatttaccttgacatttctcatactcacaccagagttgctttcaatggcatcttcaatggcttgtccagtctcgaagtcttgaaaatggctggcaattctttccaggaaaacttccttccagatatcttcacagagctgagaaacttgaccttcctggacctctctcagtgtcaactggagcagttgtctccaacagcatttaactcactctccagtcttcaggtactaaatatgagccacaacaacttcttttcattggatacgtttccttataagtgtctgaactccctccaggttcttgattacagtctcaatcacataatgacttccaaaaaacaggaactacagcattttccaagtagtctagctttcttaaatcttactcagaatgactttgcttgtacttgtgaacaccagagtttcctgcaatggatcaaggaccagaggcagctcttggtggaagttgaacgaatggaatgtgcaacaccttcagataagcagggcatgcctgtgctgagtttgaatatcacctgtcagatgaataagaccatcattggtgtgtcggtcctcagtgtgcttgtagtatctgttgtagcagttctggtctataagttctattttcacctgatgcttcttgctggctgcataaagtatggtagaggtgaaaacatctatgatgcctttgttatctactcaagccaggatgaggactgggtaaggaatgagctagtaaagaatttagaagaaggggtgcctccatttcagctctgccttcactacagagactttattcccggtgtggccattgctgccaacatcatccatgaaggtttccataaaagccgaaaggtgattgttgtggtgtcccagcacttcatccagagccgctggtgtatctttgaatatgagattgctcagacctggcagtttctgagcagtcgtgctggtatcatcttcattgtcctgcagaaggtggagaagaccctgctcaggcagcaggtggagctgtaccgccttctcagcaggaacacttacctggagtgggaggacagtgtcctggggcggcacatcttctggagacgactcagaaaagccctgctggatggtaaatcatggaatccagaaggaacagtgggtacaggatgcaattggcaggaagcaacatctatctgaagaggaaaaataaaaacctcctgaggcatttcttgcccagctgggtccaacacttgttcagttaataagtattaaatgctgccacatgtcaggccttatgctaagggtgagtaattccatggtgcactagatatgcagggctgctaatctcaaggagcttccagtgcagagggaataaatgctagactaaaatacagagtcttccaggtgggcatttcaaccaactcagtcaaggaacccatgacaaagaaagtcatttcaactcttacctcatcaagttgaataaagacagagaaaacagaaagagacattgttcttttcctgagtcttttgaatggaaattgtattatgttatagccatcataaaaccattttggtagttttgactgaactgggtgttcactttttcctttttgattgaatacaatttaaattctacttgatgactgcagtcgtcaaggggctcctgatgcaagatgccccttccattttaagtctgtctccttacagaggttaaagtctagtggctaattcctaaggaaacctgattaacacatgctcacaaccatcctggtcattctcgagcatgttctattttttaactaatcacccctgatatatttttatttttatatatccagttttcatttttttacgtcttgcctataagctaatatcataaataaggttgtttaagacgtgcttcaaatatccatattaaccactatttttcaaggaagtatggaaaagtacactctgtcactttgtcactcgatgtcattccaaagttattgcctactaagtaatgactgtcatgaaagcagcattgaaataatttgtttaaagggggcactcttttaaacgggaagaaaatttccgcttcctggtcttatcatggacaatttgggctagaggcaggaaggaagtgggatgacctcaggaggtcaccttttcttgattccagaaacatatgggctgataaacccggggtgacctcatgaaatgagttgcagcagaagtttatttttttcagaacaagtgatgtttgatggacctctgaatctctttagggagacacagatggctgggatccctcccctgtacccttctcactgccaggagaactacgtgtgaaggtattcaaggcagggagtatacattgctgtttcctgttgggcaatgctccttgaccacattttgggaagagtggatgttatcattgagaaaacaatgtgtctggaattaatggggttcttataaagaaggttcccagaaaagaatgttcatccagcctcctcagaaacagaacattcaagaaaaggacaatcaggatgtcatcagggaaatgaaaataaaaaccacaatgagatatcaccttataccaggtagaatggctactataaaaaaatgaagtgtcatcaaggatatagagaaattggaacccttcttcactgctggagggaatggaaaatggtgtagccgttatgaaaaacagtacggaggtttctcaaaaattaaaaatagaactgctatatgatccagcaatctcacttctgtatatatacccaaaataattgaaatcagaatttcaagaaaatatttacactcccatgttcattgtggcactcttcacaatcactgtttccaaagttatggaaacaacccaaatttccattgaaaaataaatggacaaagaaaatgtgcatatacgtacaatgggatattattcagcctaaaaaaagggggaatcctgttatttatgacaacatgaataaacccggaggccattatgctatgtaaaatgagcaagtaacagaaagacaaatactgcctgatttcatttatatgaggttctaaaatagtcaaactcatagaagcagagaatagaacagtggttcctagggaaaaggaggaagggagaaatgaggaaatagggagttgtctaattggtataaaattatagtatgcaagatgaattagctctaaagatcagctgtatagcagagttcgtataatgaacaatactgtattatgcacttaacattttgttaagagggtacctctcatgttaagtgttcttaccatatacatatacacaaggaagcttttggaggtgatggatatatttattaccttgattgtggtgatggtttgacaggtatgtgactatgtctaaactcatcaaattgtatacattaaatatatgcagttttataatatcaattatgtctgaatgaagctataaaaaagaaaagacaacaaaattcagttgtcaaaactggaaatatgaccacagtcagaagtgtttgttactgagtgtttcagagtgtgtttggtttgagcaggtctagggtgattgaacatccctgggtgtgtttccatgtctcatgtactagtgaaagtagatgtgtgcatttgtgcacatatccctatgtatccctatcagggctgtgtgtatttgaaagtgtgtgtgtccgcatgatcatatctgtatagaagagagtgtgattatatttcttgaagaatacatccatttgaaatggatgtctatggctgtttgagatgagttctctactcttgtgcttgtacagtagtctccccttatcccttatgcttggtggatacgttcttagaccccaagtggatctctgagaccgcagatggtaccaaacctcatatatgcaatattttttcctatacataaatacctaagataaagttcatcttctgaattaggcacagtaagagattaa

SEQ ID NO: 12 - DNA, 5339 bp, Homo sapiens
ctgtgacaaaagagataactattagagaaacaaaagtccagaatgctaaggttgccgctttcacttcctctcaccctttagcccagaactgctttgaatacaccaattgctgtggggcggctcgaggaagagaagacaccagtgcctcagaaactgctcggtcagacggtgatagcgagccacgcattcacagggccactgctgctcacagaagcagtgaggatgatgccaggatgatgtctgcctcgcgcctggctgggactctgatcccagccatggccttcctctcctgcgtgagaccagaaagctgggagccctgcgtggaggtgtgaaatccagacaattgaagatggggcatatcagagcctaagccacctctctaccttaatattgacaggaaaccccatccagagtttagccctgggagccttttctggactatcaagtttacagaagctggtggctgtggagacaaatctagcatctctagagaacttccccattggacatctcaaaactttgaaagaacttaatgtggctcacaatcttatccaatctttcaaattacctgagtatttttctaatctgaccaatctagagcacttggacctttccagcaacaagattcaaagtatttattgcacagacttgcgggttctacatcaaatgcccctactcaatctctctttagacctgtccctgaaccctatgaactttatccaaccaggtgcatttaaagaaattaggcttcataagctgactttaagaaataattttgatagtttaaatgtaatgaaaacttgtattcaaggtctggctggtttagaagtccatcgtttggttctgggagaatttagaaatgaaggaaacttggaaaagtttgacaaatctgctctagagggcctgtgcaatttgaccattgaagaattccgattagcatacttagactactacctcgatgatattattgacttatttaattgtttgacaaatgtttcttcattttccctggtgagtgtgactattgaaagggtaaaagacttttcttataatttcggatggcaacatttagaattagttaactgtaaatttggacagtttcccacattgaaactcaaatctctcaaaaggcttactttcacttccaacaaaggtgggaatgctttttcagaagttgatctaccaagccttgagtttctagatctcagtagaaatggcttgagtttcaaaggttgctgttctcaaagtgattttgggacaaccagcctaaagtatttagatctgagcttcaatggtgttattaccatgagttcaaacttcttgggcttagaacaactagaacatctggatttccagcattccaatttgaaacaaatgagtgagttttcagtattcctatcactcagaaacctcatttaccttgacatttctcatactcacaccagagttgctttcaatggcatcttcaatggcttgtccagtctcgaagtcttgaaaatggctggcaattctttccaggaaaacttccttccagatatcttcacagagctgagaaacttgaccttcctggacctctctcagtgtcaactggagcagttgtctccaacagcatttaactcactctccagtcttcaggtactaaatatgagccacaacaacttcttttcattggatacgtttccttataagtgtctgaactccctccaggttcttgattacagtctcaatcacataatgacttccaaaaaacaggaactacagcattttccaagtagtctagctttcttaaatcttactcagaatgactttgcttgtacttgtgaacaccagagtttcctgcaatggatcaaggaccagaggcagctcttggtggaagttgaacgaatggaatgtgcaacaccttcagataagcagggcatgcctgtgctgagtttgaatatcacctgtcagatgaataagaccatcattggtgtgtcggtcctcagtgtgcttgtagtatctgttgtagcagttctggtctataagttctattttcacctgatgcttcttgctggctgcataaagtatggtagaggtgaaaacatctatgatgcctttgttatctactcaagccaggatgaggactgggtaaggaatgagctagtaaagaatttagaagaaggggtgcctccatttcagctctgccttcactacagagactttattcccggtgtggccattgctgccaacatcatccatgaaggtttccataaaagccgaaaggtgattgttgtggtgtcccagcacttcatccagagccgctggtgtatctttgaatatgagattgctcagacctggcagtttctgagcagtcgtgctggtatcatcttcattgtcctgcagaaggtggagaagaccctgctcaggcagcaggtggagctgtaccgccttctcagcaggaacacttacctggagtgggaggacagtgtcctggggcggcacatcttctggagacgactcagaaaagccctgctggatggtaaatcatggaatccagaaggaacagtgggtacaggatgcaattggcaggaagcaacatctatctgaagaggaaaaataaaaacctcctgaggcatttcttgcccagctgggtccaacacttgttcagttaataagtattaaatgctgccacatgtcaggccttatgctaagggtgagtaattccatggtgcactagatatgcagggctgctaatctcaaggagcttccagtgcagagggaataaatgctagactaaaatacagagtcttccaggtgggcatttcaaccaactcagtcaaggaacccatgacaaagaaagtcatttcaactcttacctcatcaagttgaataaagacagagaaaacagaaagagacattgttcttttcctgagtcttttgaatggaaattgtattatgttatagccatcataaaaccattttggtagttttgactgaactgggtgttcactttttcctttttgattgaatacaatttaaattctacttgatgactgcagtcgtcaaggggctcctgatgcaagatgccccttccattttaagtctgtctccttacagaggttaaagtctagtggctaattcctaaggaaacctgattaacacatgctcacaaccatcctggtcattctcgagcatgttctattttttaactaatcacccctgatatatttttatttttatatatccagttttcatttttttacgtcttgcctataagctaatatcataaataaggttgtttaagacgtgcttcaaatatccatattaaccactatttttcaaggaagtatggaaaagtacactctgtcactttgtcactcgatgtcattccaaagttattgcctactaagtaatgactgtcatgaaagcagcattgaaataatttgtttaaagggggcactcttttaaacgggaagaaaatttccgcttcctggtcttatcatggacaatttgggctagaggcaggaaggaagtgggatgacctcaggaggtcaccttttcttgattccagaaacatatgggctgataaacccggggtgacctcatgaaatgagttgcagcagaagtttatttttttcagaacaagtgatgtttgatggacctctgaatctctttagggagacacagatggctgggatccctcccctgtacccttctcactgccaggagaactacgtgtgaaggtattcaaggcagggagtatacattgctgtttcctgttgggcaatgctccttgaccacattttgggaagagtggatgttatcattgagaaaacaatgtgtctggaattaatggggttcttataaagaaggttcccagaaaagaatgttcatccagcctcctcagaaacagaacattcaagaaaaggacaatcaggatgtcatcagggaaatgaaaataaaaaccacaatgagatatcaccttataccaggtagaatggctactataaaaaaatgaagtgtcatcaaggatatagagaaattggaacccttcttcactgctggagggaatggaaaatggtgtagccgttatgaaaaacagtacggaggtttctcaaaaattaaaaatagaactgctatatgatccagcaatctcacttctgtatatatacccaaaataattgaaatcagaatttcaagaaaatatttacactcccatgttcattgtggcactcttcacaatcactgtttccaaagttatggaaacaacccaaatttccattgaaaaataaatggacaaagaaaatgtgcatatacgtacaatgggatattattcagcctaaaaaaagggggaatcctgttatttatgacaacatgaataaacccggaggccattatgctatgtaaaatgagcaagtaacagaaagacaaatactgcctgatttcatttatatgaggttctaaaatagtcaaactcatagaagcagagaatagaacagtggttcctagggaaaaggaggaagggagaaatgaggaaatagggagttgtctaattggtataaaattatagtatgcaagatgaattagctctaaagatcagctgtatagcagagttcgtataatgaacaatactgtattatgcacttaacattttgttaagagggtacctctcatgttaagtgttcttaccatatacatatacacaaggaagcttttggaggtgatggatatatttattaccttgattgtggtgatggtttgacaggtatgtgactatgtctaaactcatcaaattgtatacattaaatatatgcagttttataatatcaattatgtctgaatgaagctataaaaaagaaaagacaacaaaattcagttgtcaaaactggaaatatgaccacagtcagaagtgtttgttactgagtgtttcagagtgtgtttggtttgagcaggtctagggtgattgaacatccctgggtgtgtttccatgtctcatgtactagtgaaagtagatgtgtgcatttgtgcacatatccctatgtatccctatcagggctgtgtgtatttgaaagtgtgtgtgtccgcatgatcatatctgtatagaagagagtgtgattatatttcttgaagaatacatccatttgaaatggatgtctatggctgtttgagatgagttctctactcttgtgcttgtacagtagtctccccttatcccttatgcttggtggatacgttcttagaccccaagtggatctctgagaccgcagatggtaccaaacctcatatatgcaatattttttcctatacataaatacctaagataaagttcatcttctgaattaggcacagtaagagattaa

SEQ ID NO: 13 - DNA, 5459 bp, Homo sapiens
ctgtgacaaaagagataactattagagaaacaaaagtccagaatgctaaggttgccgctttcacttcctctcaccctttagcccagaactgctttgaatacaccaattgctgtggggcggctcgaggaagagaagacaccagtgcctcagaaactgctcggtcagacggtgatagcgagccacgcattcacagggccactgctgctcacagaagcagtgaggatgatgccaggatgatgtctgcctcgcgcctggctgggactctgatcccagccatggccttcctctcctgcgtgagaccagaaagctgggagccctgcgtggagacttggccctaaaccacacagaagagctggcatgaaacccagagctttcagactccggagcctcagcccttcaccccgattccattgcttcttgctaaatgctgccgttttatcacggaggtgtgaaatccagacaattgaagatggggcatatcagagcctaagccacctctctaccttaatattgacaggaaaccccatccagagtttagccctgggagccttttctggactatcaagtttacagaagctggtggctgtggagacaaatctagcatctctagagaacttccccattggacatctcaaaactttgaaagaacttaatgtggctcacaatcttatccaatctttcaaattacctgagtatttttctaatctgaccaatctagagcacttggacctttccagcaacaagattcaaagtatttattgcacagacttgcgggttctacatcaaatgcccctactcaatctctctttagacctgtccctgaaccctatgaactttatccaaccaggtgcatttaaagaaattaggcttcataagctgactttaagaaataattttgatagtttaaatgtaatgaaaacttgtattcaaggtctggctggtttagaagtccatcgtttggttctgggagaatttagaaatgaaggaaacttggaaaagtttgacaaatctgctctagagggcctgtgcaatttgaccattgaagaattccgattagcatacttagactactacctcgatgatattattgacttatttaattgtttgacaaatgtttcttcattttccctggtgagtgtgactattgaaagggtaaaagacttttcttataatttcggatggcaacatttagaattagttaactgtaaatttggacagtttcccacattgaaactcaaatctctcaaaaggcttactttcacttccaacaaaggtgggaatgctttttcagaagttgatctaccaagccttgagtttctagatctcagtagaaatggcttgagtttcaaaggttgctgttctcaaagtgattttgggacaaccagcctaaagtatttagatctgagcttcaatggtgttattaccatgagttcaaacttcttgggcttagaacaactagaacatctggatttccagcattccaatttgaaacaaatgagtgagttttcagtattcctatcactcagaaacctcatttaccttgacatttctcatactcacaccagagttgctttcaatggcatcttcaatggcttgtccagtctcgaagtcttgaaaatggctggcaattctttccaggaaaacttccttccagatatcttcacagagctgagaaacttgaccttcctggacctctctcagtgtcaactggagcagttgtctccaacagcatttaactcactctccagtcttcaggtactaaatatgagccacaacaacttcttttcattggatacgtttccttataagtgtctgaactccctccaggttcttgattacagtctcaatcacataatgacttccaaaaaacaggaactacagcattttccaagtagtctagctttcttaaatcttactcagaatgactttgcttgtacttgtgaacaccagagtttcctgcaatggatcaaggaccagaggcagctcttggtggaagttgaacgaatggaatgtgcaacaccttcagataagcagggcatgcctgtgctgagtttgaatatcacctgtcagatgaataagaccatcattggtgtgtcggtcctcagtgtgcttgtagtatctgttgtagcagttctggtctataagttctattttcacctgatgcttcttgctggctgcataaagtatggtagaggtgaaaacatctatgatgcctttgttatctactcaagccaggatgaggactgggtaaggaatgagctagtaaagaatttagaagaaggggtgcctccatttcagctctgccttcactacagagactttattcccggtgtggccattgctgccaacatcatccatgaaggtttccataaaagccgaaaggtgattgttgtggtgtcccagcacttcatccagagccgctggtgtatctttgaatatgagattgctcagacctggcagtttctgagcagtcgtgctggtatcatcttcattgtcctgcagaaggtggagaagaccctgctcaggcagcaggtggagctgtaccgccttctcagcaggaacacttacctggagtgggaggacagtgtcctggggcggcacatcttctggagacgactcagaaaagccctgctggatggtaaatcatggaatccagaaggaacagtgggtacaggatgcaattggcaggaagcaacatctatctgaagaggaaaaataaaaacctcctgaggcatttcttgcccagctgggtccaacacttgttcagttaataagtattaaatgctgccacatgtcaggccttatgctaagggtgagtaattccatggtgcactagatatgcagggctgctaatctcaaggagcttccagtgcagagggaataaatgctagactaaaatacagagtcttccaggtgggcatttcaaccaactcagtcaaggaacccatgacaaagaaagtcatttcaactcttacctcatcaagttgaataaagacagagaaaacagaaagagacattgttcttttcctgagtcttttgaatggaaattgtattatgttatagccatcataaaaccattttggtagttttgactgaactgggtgttcactttttcctttttgattgaatacaatttaaattctacttgatgactgcagtcgtcaaggggctcctgatgcaagatgccccttccattttaagtctgtctccttacagaggttaaagtctagtggctaattcctaaggaaacctgattaacacatgctcacaaccatcctggtcattctcgagcatgttctattttttaactaatcacccctgatatatttttatttttatatatccagttttcatttttttacgtcttgcctataagctaatatcataaataaggttgtttaagacgtgcttcaaatatccatattaaccactatttttcaaggaagtatggaaaagtacactctgtcactttgtcactcgatgtcattccaaagttattgcctactaagtaatgactgtcatgaaagcagcattgaaataatttgtttaaagggggcactcttttaaacgggaagaaaatttccgcttcctggtcttatcatggacaatttgggctagaggcaggaaggaagtgggatgacctcaggaggtcaccttttcttgattccagaaacatatgggctgataaacccggggtgacctcatgaaatgagttgcagcagaagtttatttttttcagaacaagtgatgtttgatggacctctgaatctctttagggagacacagatggctgggatccctcccctgtacccttctcactgccaggagaactacgtgtgaaggtattcaaggcagggagtatacattgctgtttcctgttgggcaatgctccttgaccacattttgggaagagtggatgttatcattgagaaaacaatgtgtctggaattaatggggttcttataaagaaggttcccagaaaagaatgttcatccagcctcctcagaaacagaacattcaagaaaaggacaatcaggatgtcatcagggaaatgaaaataaaaaccacaatgagatatcaccttataccaggtagaatggctactataaaaaaatgaagtgtcatcaaggatatagagaaattggaacccttcttcactgctggagggaatggaaaatggtgtagccgttatgaaaaacagtacggaggtttctcaaaaattaaaaatagaactgctatatgatccagcaatctcacttctgtatatatacccaaaataattgaaatcagaatttcaagaaaatatttacactcccatgttcattgtggcactcttcacaatcactgtttccaaagttatggaaacaacccaaatttccattgaaaaataaatggacaaagaaaatgtgcatatacgtacaatgggatattattcagcctaaaaaaagggggaatcctgttatttatgacaacatgaataaacccggaggccattatgctatgtaaaatgagcaagtaacagaaagacaaatactgcctgatttcatttatatgaggttctaaaatagtcaaactcatagaagcagagaatagaacagtggttcctagggaaaaggaggaagggagaaatgaggaaatagggagttgtctaattggtataaaattatagtatgcaagatgaattagctctaaagatcagctgtatagcagagttcgtataatgaacaatactgtattatgcacttaacattttgttaagagggtacctctcatgttaagtgttcttaccatatacatatacacaaggaagcttttggaggtgatggatatatttattaccttgattgtggtgatggtttgacaggtatgtgactatgtctaaactcatcaaattgtatacattaaatatatgcagttttataatatcaattatgtctgaatgaagctataaaaaagaaaagacaacaaaattcagttgtcaaaactggaaatatgaccacagtcagaagtgtttgttactgagtgtttcagagtgtgtttggtttgagcaggtctagggtgattgaacatccctgggtgtgtttccatgtctcatgtactagtgaaagtagatgtgtgcatttgtgcacatatccctatgtatccctatcagggctgtgtgtatttgaaagtgtgtgtgtccgcatgatcatatctgtatagaagagagtgtgattatatttcttgaagaatacatccatttgaaatggatgtctatggctgtttgagatgagttctctactcttgtgcttgtacagtagtctccccttatcccttatgcttggtggatacgttcttagaccccaagtggatctctgagaccgcagatggtaccaaacctcatatatgcaatattttttcctatacataaatacctaagataaagttcatcttctgaattaggcacagtaagagattaa

SEQ ID NO: 14 - DNA, 787 bp, Homo sapiens
gttttctgagactgcatccactttgatagtttctactgagtccaaattagaacatcccagctggtgggctgtctcccaggaagccctcggagaggagcggtgcatagggggcacctggacacagcccacctcccccgagtagcgtcaggtaggcttgtctatctacatcctttcgccctttctcaggaaactatcagatgatgtgctcccccagatgaagaagtagtgccaggaaaaaggagacacgggatacagggatcctgaagccggcggaggacaagggagctcctgggaggacagctgtgctccggcctagcaatagcgagcagctggtccagactgccgccgtgactcagaagatagacatgcggagggttatgatcacagagcaacgatggtccttgtacatgaagataaaaatgctcaggtgtgcccaggttgaagaagatgaaaggccctgcctcccagagcgcccggggacactggtgatctcttccaggtctgtttccacccactgcagctgtgatggagtcttgctctgttgcccaggctagaatgcagtggcgtgatcttggctcaccaaaaattctgcctcctgggttcaagtgcctccacacccagctaattttgtatttttagtagagacgagatttcaccatgttggccaggctagtcttgaactcctgacattgtgatccacccacctcagcctcccaaagtgctaagattacaggtgtgagccaccatgcccggcctacctggagcattattaaaaccttaaaccttt

SEQ ID NO: 15 - DNA, 477 bp, Homo sapiens
atgtgggctccaggaccactgactatcgtgcaggatctggtgctggggggcagggcctgttttcgtatctgccaacttccactgaaacacgcagatggagaaccctccagtgctcccgagaagggagacagtcttaacccagaggacagcatccaccagcctgcaagcacggaccccgtgctgaggctctccagtttggctattgctaaacttggactagcccctactaccgatcttaatacccatgtaccaatcattgctgcatcctatttggaaagcaatggacagacagccacgctgaaagcccttactagagactggtccacaagatcagatttagctgcccctggtttgagccttgctcccctggtgtcttttctggcgaagctgggcccagagagcgttttactaagtgggctccatggtagtggaagtggtggggacagaaggctggctctatatgtggcagaggcctga

SEQ ID NO: 16 - protein, 1175 aa, Homo sapiens [sequence omitted]

SEQ ID NO: 17 - protein, 1165 aa, Homo sapiens [sequence omitted]

SEQ ID NO: 18 - protein, 51 aa, Homo sapiens
SKFSNSQTGEPLKYESPRGICQLLADILIFTFLSLPYPRGCQSHCGDGSNP

SEQ ID NO: 19 - protein, 1227 aa, Homo sapiens
MEMFAFANVNNCQPHLMIRTIKPLLVTAGVNHRYKLSAVFKMKKFNFRKVLDGLTASSPGSGSSSGSNSGGGAGSGSVHPAGTAGVLREEIQETLTSEYFQICKTVRHGFPHQPTALAFDPVQKILAIGTRTGAIRILGRPGVDCYCQHESGAAVLQLQFLINEGALVSASSDDTLHLWNLRQKRPAILHSLKFNRERITYCHLPFQSKWLYVGTERGNTHIVNIESFILSGYVIMWNKAIELSTKTHPGPVVHLSDSPRDEGKLLIGYENGTVVFWDLKSKRAELRVYYDEAIHSIDWHHEGKQFMCSHSDGSLTLWNLKSPSRPFQTTIPHGKSQREGRKSESCKPILKVEYKTCKNSEPFIIFSGGLSYDKACRRPSLTIMHGKAITVLEMDHPIVEFLTLCETPYPNEFQEPYAVVVLLEKDLIVVDLTQSNFPIFENPYPMDIHESPVTCTAYFADCPPDLILVLYSIGVKHKKQGYSNKEWPISGGAWNLGAQTYPEIIITGHADGSIKFWDASAITLQMLYKLKTSKVFEKQKVGEGKQTCEIVEEDPFAIQMIYWCPESRIFCVSGVSAYVIIYKFSRHEITTEIVSLEVRLQYDVEDIITPEPETSPPFPDLSAQLPSSRSLSGSTNTVASEGVTKDSIPCLNVKTRPVRMPPGYQAELVIQLVWVDGEPPQQITSLAVSSAYGIVAFGNCNGLAVVDFIQKTVLLSMGTIDLYRSSDLYQRQPRSPRKNKQFIADNFCMRGLSNFYPDLTKRIRTSYQSLTELNDSPVPLELERCKSPTSDHVNGHCTSPTSQSCSSGKRLSSADVSKVNRWGPGRPPFRKAQSAACMEISLPVTTEENRENSYNRSRSSSISSIDKDSKEAITALYFMDSFARKNDSTISPCLFVGTSLGMVLIISLNLPLADEQRFTEPVMVLPSGTFLSLKGAVLTFSCMDRMGGLMQPPYEVWRDPNNIDENEKSWRRKVVMNSSSASQEIGDHQYTIICSEKQAKVFSLPSQTCLYVHNITETSFILQANVVVMCSSACLACFCANGHIMIMSLPSLRPMLDVNYLPLTDMRIARTFCFTNEGQALYLVSPTEIQRLTYSQEMCDNLQDMLGDLFTPIETPEAQNRGFLKGLFGGSGQTFDREELFGEASAGKASRSLAQHIPGPGSIEGMKGAAGGVMGELTRARIALDERGQRLGELEEKTAGMMTSAEAFSKHAHELMLKYKDKKWYQF

SEQ ID NO: 20 - protein, 1186 aa, Homo sapiens
MKKFNFRKVLDGLTASSPGSGSSSGSNSGGGAGSGSVHPAGTAGVLREEIQETLTSEYFQICKTVRHGFPHQPTALAFDPVQKILAIGTRTGAIRILGRPGVDCYCQHESGAAVLQLQFLINEGALVSASSDDTLHLWNLRQKRPAILHSLKFNRERITYCHLPFQSKWLYVGTERGNTHIVNIESFILSGYVIMWNKAIELSTKTHPGPVVHLSDSPRDEGKLLIGYENGTVVFWDLKSKRAELRVYYDEAIHSIDWHHEGKQFMCSHSDGSLTLWNLKSPSRPFQTTIPHGKSQREGRKSESCKPILKVEYKTCKNSEPFIIFSGGLSYDKACRRPSLTIMHGKAITVLEMDHPIVEFLTLCETPYPNEFQEPYAVVVLLEKDLIVVDLTQSNFPIFENPYPMDIHESPVTCTAYFADCPPDLILVLYSIGVKHKKQGYSNKEWPISGGAWNLGAQTYPEIIITGHADGSIKFWDASAITLQMLYKLKTSKVFEKQKVGEGKQTCEIVEEDPFAIQMIYWCPESRIFCVSGVSAYVIIYKFSRHEITTEIVSLEVRLQYDVEDIITPEPETSPPFPDLSAQLPSSRSLSGSTNTVASEGVTKDSIPCLNVKTRPVRMPPGYQAELVIQLVWVDGEPPQQITSLAVSSAYGIVAFGNCNGLAVVDFIQKTVLLSMGTIDLYRSSDLYQRQPRSPRKNKQFIADNFCMRGLSNFYPDLTKRIRTSYQSLTELNDSPVPLELERCKSPTSDHVNGHCTSPTSQSCSSGKRLSSADVSKVNRWGPGRPPFRKAQSAACMEISLPVTTEENRENSYNRSRSSSISSIDKDSKEAITALYFMDSFARKNDSTISPCLFVGTSLGMVLIISLNLPLADEQRFTEPVMVLPSGTFLSLKGAVLTFSCMDRMGGLMQPPYEVWRDPNNIDENEKSWRRKVVMNSSSASQEIGDHQYTIICSEKQAKVFSLPSQTCLYVHNITETSFILQANVVVMCSSACLACFCANGHIMIMSLPSLRPMLDVNYLPLTDMRIARTFCFTNEGQALYLVSPTEIQRLTYSQEMCDNLQDMLGDLFTPIETPEAQNRGFLKGLFGGSGQTFDREELFGEASAGKASRSLAQHIPGPGSIEGMKGAAGGVMGELTRARIALDERGQRLGELEEKTAGMMTSAEAFSKHAHELMLKYKDKKWYQF

SEQ ID NO: 21 - protein, 448 aa, Homo sapiens
MKGFIDDANYSVGLLDEGTNLGNVIDNYVYEHTLTGKNAFFVGDLGKIVKKHSQWQNVVAQIKPFYTVKCNSAPAVLEILAALGTGFACSSKNEMALVQELGVPPENIIYISPCKQVSQIKYAAKVGVNILTCDNEIELKKIARNHPNAKVLLHIATEDNIGGEEGNMKFGTTLKNCRHLLECAKELDVQIIGVKFHVSSACKESQVYVHALSDARCVFDMAGEIGFTMNMLDIGGGFTGTEFQLEEVNHVISPLLDIYFPEGSGVKIISEPGSYYVSSAFTLAVNIIAKKVVENDKFPSGVEKTGSDEPAFMYYMNDGVYGSFASKLSEDLNTIPEVHKKYKEDEPLFTSSLWGPSCDELDQIVESCLLPELNVGDWLIFDNMGADSFHEPSAFNDFQRPAIYYMMSFSDWYEMQDAGITSDSMMKNFFFVPSCIQLSQEDSFSAEA

SEQ ID NO: 22 - protein, 346 aa, Homo sapiens [sequence omitted]

SEQ ID NO: 23 - protein, 448 aa, Homo sapiens; identical to SEQ ID NO: 21

SEQ ID NO: 24 - protein, 271 aa, Homo sapiens
MWELRSIAFSRAVFAEFLATLLFVFFGLGSALNWPQALPSVLQIAMAFGLGIGTLVQALGHISGAHINPAVTVACLVGCHVSVLRAAFYVAAQLLGAVAGAALLHEITPADIRGDLAVNALSNSTTAGQAVTVELFLTLQLVLCIFASTDERRGENPGTPALSIGFSVALGHLLGIHYTGCSMNPARSLAPAVVTGKFDDHWVFWIGPLVGAILGSLLYNYVLFPPAKSLSERLAVLKGLEPDTDWEEREVRRRQSVELHSPQSLPRGTKA

SEQ ID NO: 25 - protein, 839 aa, Homo sapiens
MMSASRLAGTLIPAMAFLSCVRPESWEPCVEVVPNITYQCMELNFYKIPDNLPFSTKNLDLSFNPLRHLGSYSFFSFPELQVLDLSRCEIQTIEDGAYQSLSHLSTLILTGNPIQSLALGAFSGLSSLQKLVAVETNLASLENFPIGHLKTLKELNVAHNLIQSFKLPEYFSNLTNLEHLDLSSNKIQSIYCTDLRVLHQMPLLNLSLDLSLNPMNFIQPGAFKEIRLHKLTLRNNFDSLNVMKTCIQGLAGLEVHRLVLGEFRNEGNLEKFDKSALEGLCNLTIEEFRLAYLDYYLDDIIDLFNCLTNVSSFSLVSVTIERVKDFSYNFGWQHLELVNCKFGQFPTLKLKSLKRLTFTSNKGGNAFSEVDLPSLEFLDLSRNGLSFKGCCSQSDFGTTSLKYLDLSFNGVITMSSNFLGLEQLEHLDFQHSNLKQMSEFSVFLSLRNLIYLDISHTHTRVAFNGIFNGLSSLEVLKMAGNSFQENFLPDIFTELRNLTFLDLSQCQLEQLSPTAFNSLSSLQVLNMSHNNFFSLDTFPYKCLNSLQVLDYSLNHIMTSKKQELQHFPSSLAFLNLTQNDFACTCEHQSFLQWIKDQRQLLVEVERMECATPSDKQGMPVLSLNITCQMNKTIIGVSVLSVLVVSVVAVLVYKFYFHLMLLAGCIKYGRGENIYDAFVIYSSQDEDWVRNELVKNLEEGVPPFQLCLHYRDFIPGVAIAANIIHEGFHKSRKVIVVVSQHFIQSRWCIFEYEIAQTWQFLSSRAGIIFIVLQKVEKTLLRQQVELYRLLSRNTYLEWEDSVLGRHIFWRRLRKALLDGKSWNPEGTVGTGCNWQEATSI

SEQ ID NO: 26 - protein, 799 aa, Homo sapiens
MELNFYKIPDNLPFSTKNLDLSFNPLRHLGSYSFFSFPELQVLDLSRCEIQTIEDGAYQSLSHLSTLILTGNPIQSLALGAFSGLSSLQKLVAVETNLASLENFPIGHLKTLKELNVAHNLIQSFKLPEYFSNLTNLEHLDLSSNKIQSIYCTDLRVLHQMPLLNLSLDLSLNPMNFIQPGAFKEIRLHKLTLRNNFDSLNVMKTCIQGLAGLEVHRLVLGEFRNEGNLEKFDKSALEGLCNLTIEEFRLAYLDYYLDDIIDLFNCLTNVSSFSLVSVTIERVKDFSYNFGWQHLELVNCKFGQFPTLKLKSLKRLTFTSNKGGNAFSEVDLPSLEFLDLSRNGLSFKGCCSQSDFGTTSLKYLDLSFNGVITMSSNFLGLEQLEHLDFQHSNLKQMSEFSVFLSLRNLIYLDISHTHTRVAFNGIFNGLSSLEVLKMAGNSFQENFLPDIFTELRNLTFLDLSQCQLEQLSPTAFNSLSSLQVLNMSHNNFFSLDTFPYKCLNSLQVLDYSLNHIMTSKKQELQHFPSSLAFLNLTQNDFACTCEHQSFLQWIKDQRQLLVEVERMECATPSDKQGMPVLSLNITCQMNKTIIGVSVLSVLVVSVVAVLVYKFYFHLMLLAGCIKYGRGENIYDAFVIYSSQDEDWVRNELVKNLEEGVPPFQLCLHYRDFIPGVAIAANIIHEGFHKSRKVIVVVSQHFIQSRWCIFEYEIAQTWQFLSSRAGIIFIVLQKVEKTLLRQQVELYRLLSRNTYLEWEDSVLGRHIFWRRLRKALLDGKSWNPEGTVGTGCNWQEATSI

SEQ ID NO: 27 - protein, 639 aa, Homo sapiens
MPLLNLSLDLSLNPMNFIQPGAFKEIRLHKLTLRNNFDSLNVMKTCIQGLAGLEVHRLVLGEFRNEGNLEKFDKSALEGLCNLTIEEFRLAYLDYYLDDIIDLFNCLTNVSSFSLVSVTIERVKDFSYNFGWQHLELVNCKFGQFPTLKLKSLKRLTFTSNKGGNAFSEVDLPSLEFLDLSRNGLSFKGCCSQSDFGTTSLKYLDLSFNGVITMSSNFLGLEQLEHLDFQHSNLKQMSEFSVFLSLRNLIYLDISHTHTRVAFNGIFNGLSSLEVLKMAGNSFQENFLPDIFTELRNLTFLDLSQCQLEQLSPTAFNSLSSLQVLNMSHNNFFSLDTFPYKCLNSLQVLDYSLNHIMTSKKQELQHFPSSLAFLNLTQNDFACTCEHQSFLQWIKDQRQLLVEVERMECATPSDKQGMPVLSLNITCQMNKTIIGVSVLSVLVVSVVAVLVYKFYFHLMLLAGCIKYGRGENIYDAFVIYSSQDEDWVRNELVKNLEEGVPPFQLCLHYRDFIPGVAIAANIIHEGFHKSRKVIVVVSQHFIQSRWCIFEYEIAQTWQFLSSRAGIIFIVLQKVEKTLLRQQVELYRLLSRNTYLEWEDSVLGRHIFWRRLRKALLDGKSWNPEGTVGTGCNWQEATSI

SEQ ID NO: 28 - protein, 782 aa, Homo sapiens
MKPRAFRLRSLSPSPRFHCFLLNAAVLSRRCEIQTIEDGAYQSLSHLSTLILTGNPIQSLALGAFSGLSSLQKLVAVETNLASLENFPIGHLKTLKELNVAHNLIQSFKLPEYFSNLTNLEHLDLSSNKIQSIYCTDLRVLHQMPLLNLSLDLSLNPMNFIQPGAFKEIRLHKLTLRNNFDSLNVMKTCIQGLAGLEVHRLVLGEFRNEGNLEKFDKSALEGLCNLTIEEFRLAYLDYYLDDIIDLFNCLTNVSSFSLVSVTIERVKDFSYNFGWQHLELVNCKFGQFPTLKLKSLKRLTFTSNKGGNAFSEVDLPSLEFLDLSRNGLSFKGCCSQSDFGTTSLKYLDLSFNGVITMSSNFLGLEQLEHLDFQHSNLKQMSEFSVFLSLRNLIYLDISHTHTRVAFNGIFNGLSSLEVLKMAGNSFQENFLPDIFTELRNLTFLDLSQCQLEQLSPTAFNSLSSLQVLNMSHNNFFSLDTFPYKCLNSLQVLDYSLNHIMTSKKQELQHFPSSLAFLNLTQNDFACTCEHQSFLQWIKDQRQLLVEVERMECATPSDKQGMPVLSLNITCQMNKTIIGVSVLSVLVVSVVAVLVYKFYFHLMLLAGCIKYGRGENIYDAFVIYSSQDEDWVRNELVKNLEEGVPPFQLCLHYRDFIPGVAIAANIIHEGFHKSRKVIVVVSQHFIQSRWCIFEYEIAQTWQFLSSRAGIIFIVLQKVEKTLLRQQVELYRLLSRNTYLEWEDSVLGRHIFWRRLRKALLDGKSWNPEGTVGTGCNWQEATSI

SEQ ID NO: 29 - protein, 111 aa, Homo sapiens [sequence omitted]

SEQ ID NO: 30 - protein, 158 aa, Homo sapiens [sequence omitted]

SEQ ID NO: 31 - DNA, 201 bp, Homo sapiens
ctgaggctggagaagcacatctcggagcagagggcgggctacgggggcactggcagcatcgagatccctgtcctctgcttgctggtcaatggtgatcccarcaccttggagaggatctccagggccgtggagcaggctgccccgtggctgatcctggcaggctcggggggcatcgccgatgtgcttgctgccctagtgaac

SEQ ID NO: 32 - DNA, 201 bp, Homo sapiens; identical to SEQ ID NO: 31

SEQ ID NO: 33 - DNA, 201 bp, Homo sapiens
cgccagaaaagacaccaggggagcaaggctcaaaccaggggcagctaaatctgatcttgtggaccagtctctagtaagggctttcagcgtggctgtctgtycattgctttccaaataggatgcagcaatgattggtacatgggtattaagatcggtagtaggggctagtccaagtttagcaatagccaaactggagagcct

SEQ ID NO: 34 - DNA, 201 bp, Homo sapiens
ctccagtattgacaaagattctaaagaagcaattacagcactatacttcatggactcctttgcacggaaaaatgactctaccatctctccttgtctgttcrttggaaccagtctgggaatggtgttaatcatctccttaaacctaccattagcagatgaacaaaggtttacagagccagtcatggtattgccaagtggtac

SEQ ID NO: 35 - DNA, 201 bp, Homo sapiens; identical to SEQ ID NO: 34

SEQ ID NO: 36 - DNA, 201 bp, Homo sapiens
aaccagccttcatgtattatatgaatgatggtgtttatggttcttttgcaagtaaactgtctgaggacttaaataccattccagaggttcacaagaaatayaaggaagatgagcctctgtttacaagcagcctttggggtccatcctgtgatgagcttgatcaaattgtggaaagctgtcttcttcctgagctgaatgtgg

SEQ ID NO: 37 - DNA, 201 bp, Homo sapiens
agccttcatgtattatatgaatgatggtgtttatggttcttttgcaagtaaactgtctgaggacttaaataccattccagaggttcacaaggcaaaaatayaaggaagatgagcctctgtttacaagcagcctttggggtccatcctgtgatgagcttgatcaaattgtggaaagctgtcttcttcctgagctgaatgtgg

SEQ ID NO: 38 - DNA, 201 bp, Homo sapiens; identical to SEQ ID NO: 36

SEQ ID NO: 39 - DNA, 201 bp, Homo sapiens
gggctggtttctgccctttaagagcacccggtcagtcagagaacagagatcacacacaccaaaccagacagaggcagggcagcatggagacaggtagacasacctccaggtccctaagctggggacagagaaggttctgagctgtcccatactcccactttgtgccaaatgactttgcacctgcaaatggtgcttcaatgt

SEQ ID NO: 40 - DNA, 201 bp, Homo sapiens
gctttttcagaagttgatctaccaagccttgagtttctagatctcagtagaaatggcttgagtttcaaaggttgctgttctcaaagtgattttgggacaaycagcctaaagtatttagatctgagcttcaatggtgttattaccatgagttcaaacttcttgggcttagaacaactagaacatctggatttccagcattcc

SEQ ID NO: 41 - DNA, 201 bp, Homo sapiens; identical to SEQ ID NO: 40

SEQ ID NO: 42 - DNA, 201 bp, Homo sapiens; identical to SEQ ID NO: 40

SEQ ID NO: 43 - DNA, 201 bp, Homo sapiens; identical to SEQ ID NO: 40

SEQ ID NO: 44 - DNA, 201 bp, Homo sapiens
gacacgggatacagggatcctgaagccggcggaggacaagggagctcctgggaggacagctgtgctccggcctagcaatagcgagcagctggtccagactsccgccgtgactcagaagatagacatgcggagggttatgatcacagagcaacgatggtccttgtacatgaagataaaaatgctcaggtgtgcccaggttga

SEQ ID NO: 45 - DNA, 201 bp, Homo sapiens
aggctctccagtttggctattgctaaacttggactagcccctactaccgatcttaatacccatgtaccaatcattgctgcatcctatttggaaagcaatgracagacagccacgctgaaagcccttactagagactggtccacaagatcagatttagctgcccctggtttgagccttgctcccctggtgtcttttctggcg

SEQ ID NO: 46 - DNA, 38540 bp, Homo sapiens
ccatccagggcctggccagtccaggaagagggagcctatgcccgtgtctccagtgggggaaactgaggcagatcccatggctcccccttccgtggggagcaggaacaagggggtggggaagatcagtcaggggtcatgctgctgcacacgcctccctgggggctgcagacatcctggactcaccagcctgtgaccccaaaccacacgccccgccccatccaccccatcctgtggagcctggtgccgcgtggggacatcctgggctttgacggctcctccctgcgctgagttttagcctctgtgccccagggctccacacaagccgctcactcctggtcaggtcgtgggctggtggctcccactagcccctcacagacacgcctgctgggcacctgggtgtgtgtccttgggccccgcctacagcctgccctctttcctccctctggccactgcccggctccagttcttcacctgcctggtcatcctgtttgcctgtgaggtggccgccggcatctggggctttgtcaacaaggaccaggtgagcctgggtgtgcagggacagggtggggtgggtgacgggggcaccctcctctcctgtcgcgggtgggggttgggctgactcatggcttgtgggagctctttgggctcttcctgggtcccacttgccaggaggatctccaggggctttatggaggaggcagcattggggctgagcaccaggccagcctcccgtgtcccagcactcccggggcagctgagagtgcagagtccttgtcctctggggtctagcctcgaagccaccctgcccagggagagcctgggaaaagtgcgtccgcctggggcggggcggggtgggggcaaggagggggaggttccccctgtgcatgtgaccgcacccctcccccagatcgccaaggatgtgaagcagttctatgaccaggccctacagcaggccgtggtggatgatgacgccaacaacgccaaggctgtggtgaagaccttccacgagacggtgcggccccggggggcgagggcggggagcagggccccgggaacccggcggggtgtgtctcgtcctggatgaatcctgcctacgcccagacctcaggagcaggaggtgcccttgggacctccaggacccctggtctcaactggtcctcgggtgggaacctagtgggccagggtggcccagggtgcggaaagctctgagcagcgcagctgaggaggaagaaggctggcccctggatgcattctgcagtggggagcgctgcgtacccctggccacctccccatgggttccctagagccaccgtccccctgggcacatccagggctgaccttgcacccctgctctctgcagcttgactgctgtggctccagcacactgactgctttgaccacctcagtgctcaagaacaatttgtgtccctcgggcagcaacatcatcagcaacctcttcaaggtgcgcgaggccggtggggccgcgcctgaccccccgcatgtcccgcccctgggtggggtcctaggggtgggcaggtcacacggcagccccacagggagcgaccacactgggtggcatggcccctgtcagggctgctctgctgggagggttggggtgggaccgcatctggcccacgaggaaggcaggcgccctgtgctgcgcattccgggtgaagaaggtggaggctctggggggtgggaactcacctgcacccccagctccacgtgtgcactcgtgggtgtggacgcccctgacagcctgtagctggcagggcctgcaggccatatagtgccctgtggaagtttcctgctgaggcctcagtggaagtcgtcatcagtgatgctttaggggtctagtgacaccaatgaccgtgatctcagtggaaaagggcacagtgtgtcccaggcatttcgcgtttatgttaaaacgggtggaagatagcaagccggcagaggccgggccgctgcacccgcctgttccgaggtgggtagggggtggggggctgttcccaggattcccctctacgctttctgtggtgaccacggattactgcgtgacaacgggaagccgggagccgaggcccggtccctgaccacgcgtgcctggccacccctgcaggaggactgccaccagaagatcgatgacctcttctccgggaagctgtacctcatcggcattgctgccatcgtggtcgctgtgatcatggtgagcgggcgggggcggagggcctgctctctgggctgccccttccgcggggccttgtgctgactgcgccccccaccaccctcctgcagatcttcgagatgatcctgagcatggtgctgtgctgtggcatccggaacagctccgtgtactgaggccccgcagctctggccacagggacctctgcagtgccccctaagtgacccggacacttccgagggggccatcaccgcctgtgtatataacgtttccggtattactctgctacacgtagcctttttacttttggggttttgtttttgttctgaactttcctgttaccttttcagggctgacgtcacatgtaggtggcgtgtatgagtggagacgggcctgggtcttggggactggagggcaggggtccttctgccctggggtcccagggtgctctgcctgctcagccaggcctctcctgggagccactcgcccagagactcagcttggccaacttggggggctgtgtccacccagcccgcccgtcctgtgggctgcacagctcaccttgttccctcctgccccggttcgagagccgagtctgtgggcactctctgccttcatgcacctgtcctttctaacacgtcgccttcaactgtaatcacaacatcctgactccgtcatttaataaagaaggaacatcaggcatgctaccaggcctgtgcagtccctcagtgccagtggtgtctgagacctaggggttggccggagggcaggggaatctgacatcggtggggcttggctctgtggactctgtggggtccagggtgagggtgggtgggtcgggatccctggtgttcaccaaaggagtcactctgtaaaatttggggagttatttattctgagccaaatatgagcaccggtggcctgtgacacagccccaggtcctgagaacttgtgcccaaggcggtctggctacttaattgtatacattttagggacataggacattgatcattacatctaagatgtacgttggtttagtcggaaaggtgggacgatttgaaggggagggactttcaggtcataggcggattaaaagatgttctgattaataattggttgattttatctaaagacctgaaatcaatagaatggactatctgggttaagaggagttgtggagaccaagattattatgcagatgaagccgccagattgtaaatgtttcttatcagacttaaaaaggtaccagaatcttagttaattctctcctggatcaggaaatagacctggaaagggagggggattctctatagaatgtagattttcccaagagacagctttgcagggccatttcaaaatacatcagagaaatatattttggggtaaaatacttcggtttctttcagggcctgctgtcacgttggtatcttattactacagagtctgttttgtgagtcttaaggtctttttatttttagacagagttttgctcttgtcacccaggttggagtgcaatggcgtgatctcagctcactgcagcctcccctccacctcccaggttcaagcgattctcctgcctcagcctcctgagtagctgggacaacaggcatgcaccaccccacccagctaattttgtatttttagtagagacggtgtttcgccacggtggccaggctagtctcgaactcctgacctcacgtgacacaccaggttttgggattacaggtgtgagccaccacaccggactaaggtctctgttttaatgtgaatgctggtcagctgtgcctatgaggcatgttcggccacccacagtcatcatggcctcaacgagcttttcaggtttactttagaatgcatttggccaagaggtgcccattcagttggttggggttgcttagaattttactttgggtttaaaccagggagcaactccaggtagcaagggccctttttgggagcgttctctctattctcttttgggagaggccctgtgttgcctgcagccacttccaccctgccccttgggcacacaaggggcacacagtgtaagcaggtgggcaggaggggtcgggcagccagggaatgcagtgagatgggcttggggtaggggctgggtgcgctgcaggactcctcttcctcctgagggatggtaaaggatggacacactgccccctcccgagcatttgagggtctctgccctgcccatctgttacctgtaaatgttcctttgaggagctgatggctcaggcctgagccacatctcagagggtctggaggggaagaaagacctcatcctactagggagcccccccagcccaccagcgagcggtggttgggggcagacaggctgtggggctaaggagcccctgcactcccccgtccttttccctttgtctgagcacctccagccagtgggcttggtctagactctcctatctttccccacatcgtggggtggggcttgctctgggttaggctacttttccctagttgtggggaggggggtgctggcacatttcactgttccctggaggaaatgagtgcctgggaattcatatctagggctcccagcagcctctttgcaggccaatttggaaactgtccccagccctgcattttagggggttacagagtctctcagcaggccctcctcccctgctgctcccaacttgcaagcctgcactggttgggagaacataatggtccaaggagccccctctctactttccgctgtgttccctgtggggagggaagagcagtttaagaaataaggaatcccaaaggcgcacagcagaccgggggccgaggagtgggtcctgcttcccctccttttttctaggctgagccacagcaggtccttgaatcctatttcccagcggatgccaggacagcaggccctgggggagttctctctcgagcctttcagagggaccagaggtctagcagccaaggagaactcagaatccttgagtgtgtggggcaggaactctcccagctgagaaggggcacaaggtgccaaccatctagggcccagtggccaaggaagacgcggcttgtcgcagggagaatctgggccctggtcctccctttcagggcgggcagctgacctgccccctgctgcggacaggcgaggccaggctgctggctcgcaagcatggcggagcccaaaccttccctgctgccgcccgcccagccacggctgacttggaagcttgaggagcgttcagcagcctccatcctgcccgggaggaccggggacctggaagggcctggccctcgcttccctgcagcgccctagggggacgtctcagtgcctcccggagcccggaccaatgcaccagagctgagggcccaagggtgtgagggtggccgggcagtggccccgaggacggcgccccacaagtttgcggccagggcccagcaaacccctaggggtgggaaagcgtcggcccagctagcgggtccagcagggccgcccccttcaccgtggcccagcggtcacgaccccacgtcctcatcgcgggctgggactgcctctgcgtctggcctgagcgggaccgtgggatcctggggagccccgcctcggtgcactgacagagcccagaaggagtgacggttaccgcttccggtcaggaccggaagtgccgggaacggcattcgtcctccgtgcgagatgacgcacttcctgcctgaggcggccgctgttctcgcggcttccggcaggtggcgctgagaccacgggaagccagcctggctgtcggttagccctcgagcattctgggaattgcaggcctggcccctcctcttcctgttcttggtcaattccggtcttgtttccccaacaaatgccgtcgtttccggggctgcttccgagccggacccaagggccggggcgtggaggagtagaggggcgagcgcatgcgcacaggactacacgtcccgacaggcgtcgggagcggcggcccagttccttgtgggagctgtagttctgcaggcgcggaagccgtggtgctcggccggcagagcactcggtttcccagagggctgagcgcgccgcacggaggtgcggcgccgaccaagatggagactgccgagcagccttgagccggtaggtttgtggtgagggaggacgggccgcgcgggccggccgagcctccgggaggtcaccgagcgcagctttaatacctgagctcgaaggccccgctgtgctcgccgacccccgtacctcgcggccgggcccttgggacccacagcatccttgtgaggcccggaggcctgtccagcccgactggacagtgccgaggggcaccgagagccagcttggcaccgagagttcgtttgttctctggcggggaggtcttgctggcacatatagtggagaaaggccgggctctgcgttcatgtggagaaagagacggcttccttcagcctacggacatgaaggagtcaactctaccttccactcgttgccggctttcgccgagaaccccgagaaacggactaccggagtccctatcttgcagcccgatccccgctacccgtcggagtgccccgctgaccaggctgcttctggccgcggcggcgttccgctgcagaggacgggagtgcgaatctgggaagcagggttctggttgaactccagcttcgtctgcaacatactgtgtgacttgggcaaattatttcccccgccccgttcctgccagctttaaaacggtcatcagtggggggtgctgcgtatcccctttcactggggtggcttcttcactgaggagagtcgcgcctcagaggaactgaggtcctgcctgtgttcgacctggtggggggcactaagagcccctgatagtacccctgaccccatccttattgggtgcacaagacacaggtcactctgggcgggcaaggagttttggtagcaggagaggagtcggtggatggatggctgaggacagtgcagaagggtgtggctgggccgtctttttttgcctggaaattcaagttctgaggcacccagtcactccagcactaaatgggtgcaggaggcagcacttgtctgcccagctggaaaggcagggtatgtgctgagtgttacaggtggaaggccactggaggtcgctccaggagccgcggggatttacctctgcctaacagggctgctcaaggtgatggtcgacaccccactttcctgagagcttgaccctcagatgccagggccttggctgcagattccttgggagctcccggggatcttccagcaaataggagcaaatcttttccccgtggatcaggaaggtgcacgctctttgtggaatacgactgctcaccccgcacagcaagcagcttataagtggccctcctgcctgatttcagccctgggttcaagccctgggtggctgcttactaccaaaatcgctcagtagctccaagcctgcctgcagagggttggcaccattaaatgaggtaacgagtcaaaagtccctaccctgggtcctagcctgtcaggggctccgaaaacccaggctcaggtcggtcctgcccggcacctgtttcacacatgtacactccggtctgaggttggtcctctcccccaccccacccacctgcagttgagcagctgaacagaggccatgccggggcactccgaggcctgagacgaccacgcctgtgccgctgaggaccttcatcagggctccgtccacttggcccgcttggctgtccaatcacactccagtgtcaaccactggcacccagcagccaagagaggtgagaggagggcttggagggggaggcgggactccaccctgtgtgggacagttctgtcagttgaccctccacttgtccaggggcagtggatctgcagggggaactcattctcaatactgttcctcctgagaaacaaattttctgggctgttttggtttaggtgtggcgtggccctggggacgcatggctgaggcaggaacaggtgagccgtcccccagcgtggagggcgaacacgggacggagtatgacacgctgccttccgacacagtctccctcagtgactcggactctgacctcagcttgcccggtggtgctgaagtggaagcactgtccccgatggggctgcctggggaggaggattcaggtcctgatgagccgccctcacccccgtcaggcctcctcccagccacggtgcagccattccatctgagaggcatgagctccaccttctcccagcgcagccgtgacatctttgactgcctggagggggcggccagacgggctccatcctctgtggcccacaccagcatgagtgacaacggaggcttcaagcggcccctagcgccctcaggccggtctccagtggaaggcctgggcagggcccatcggagccctgcctcaccaagggtgcctccggtccccgactacgtggcacaccccgagcgctggaccaagtacagcctggaagatgtgaccgaggtcagcgagcagagcaatcaggccaccgccctggccttcctgggctcccagagcctggctgcccccactgactgcgtgtcctccttcaaccaggatccctccagctgtggggaggggagggtcatcttcaccaaaccagtccgaggggtcgaagccagacacgagaggaagagggtcctggggaaggtgggagagccaggcaggggcggccttgggaatcctgccacagacaggggcgagggccctgtggagctggcccatctggccgggcccgggagcccagaggctgaggagtggggcagcccccatggaggcctgcaggaggtggaggcactgtcagggtctgtccacagtgggtctgtgccaggtctcccgccggtggaaactgttggcttccatggcagcaggaagcggagtcgagaccacttccggaacaagagcagcagccccgaggacccaggtgctgaggtctgagagggagatggcccagcctgaccccactggccactgccatcctgctgccttcccagtggggctggtcagggggcagcctggccactgcctagctggaatgggaggaagcctgcaggtggcaccggtggccctggctgcagttctgggcagcatcctcccaagcagagaccttgctgaagctcctggggtgtggggtgtgggctggaagcactggctccctggtagggacaataaaggttttgggtctttctgagactttgtgtctatctgggccctgcttacccaaagggctcagttggcagcaagagctccccacacctgaccctcggtgccggaccactcgagggtggctgacacctgcatccctcaccagcacatcacccaggtgacagtgagaattggaaaccccaggcctcctctagggcttgtggctcagtggcaggtgtccagtgagtgccctcaatgggcctgagtgggtacagaatctgccctcccccaaccaaagcccacatgatgccatcagccccaggcctagtgcagaccacagcttgggaagcgaaagggagatgacaaaatgggtgtggacagaggaggctggggtgagtgggcagttggggggcctgggcaggtgtttgagcctggggtccagttttatctgggccacgtggggtacagtgttttccaggctccactgaagataaagcagccactggtgccagcaggggctttgtcttggggccataaacaccagtgtgtgctgtactggccatcgggtgtcagggggacagctgacagatgcagtggatgcccagccctgtcttccaggagccagtcacctgagccccaaaggaccttttgggtcttaagtgacagaaattctaaccaccagtgtttcaaaaaaagatgagtctcttgtcaggcaacacaagtcagggcaggggtgggtgcagaccccagagcagcttcgcagtctggatgggggtgctcccccgtcacgccacagggccagcttttccacagtgcaggctggtcagtttccaggtagggatgcggtggggcacgttttctgcccggggagttgtgcctgtcaggggagacagccccatgacactgctgtgcctccggggaggccaggagggacaaggagcggttcctttgggtgagggtctgtggtgaggcaccaggagggccattgtctgctggggggctggtgccccctggggggttccgctggaggtcggcaaaggtcagtgcacaacgtgcagggtggccagctgaggagaggtggccccacacgtggcaggccaagcagctcaggtgtccgagggaggctggccagccccgggttgttcccagccatctaaaccacctctgtggtcagcagccaccagctggcttccctcgccacagtgctgagagcctgctgggaaggaaggcccccctgagcggtgggaaccagcaaggcaggcccaggaaggggagaggtagctggctcagaggcaagggccaggacgccgtggctctcagagtgagtccccacaggccagcctggggaagatggggagcccagagacaaccaggcctctgcctgcactcctgggactaggaaagcagcccccttgaggccgaggggcccgtttgcttgctgagcaggacagtccaatagggcccacgccaggcagagcctcaagagtctgagtgaagcacattcggccctggccaaggcagggactccgtcagagggcacccacaccaccctgaagagccgcgtccagccaaggcctcctgagactcccgggccaggcagggaaggcagagcacacagcacagcctacggccccccagccgctgcagagtgggtgcccatgcccaccctcatcccacgctccccaaacaggcttactccgggggccgccaccctgggccagcacgtcagccacggaggacacgagcaccgagcagtagttgatctggagaagggaaacacgtccgggaagctccagggctctctcaggacagcaggggacaggcagcctccccatctcccctctcctgccagggcccccgctgccctgtgactcctccctctgagagctgccgctcacaggcaggggtgagtgaggctcccgtgaggcgtgtagagtgaaaggcgaggggtcttcaatgtgagacccctcatttaaggctgtagcctcccaagtggcagggtgggaggaggcacaggtggggacggcctgtcttccccagaacgctcctctgcccactggggtgctcctgtcctggctctggcctgcctcatctctgtgagtgaccgggcagggctgtggacccatcccagtagccccacgcagccacccgcctcccatcagggagaggagctctggggctcgcttgcctgtgactccagacacttgatgcgcttttcttgctctctcagccccccgaggtacttggcaatgaagtccactctgcggcaggagcaggtggtcaggctgtggatggccacgcggtgctctgcgtgtggggagcctccccatccccccaggcctccctgtgtgcccgagtttggggtgccctggccctttcccttcctccctcatgcccagatctggtggcaccaggacccctcaaagtgcacctggtgcagtacagagcgctctatgccttcccagtagggctagggtgccatccctgcctgggcgcaccacccagaaagacggtgcagggcaggcagtcggggacaggcccctggagccagggctggagggaagccaggggtgggtagtcccaaccctgagaccacagcagggagggcgccacggtcactgtgcacgctccctttttgcctggccaggcgtcccagcagggtcctgcacaggtcaggctggaaagctaggcccctgggctcggccagagccctgcccctaccccttcagcttcagttcgccagctcagatcctctgtcactggcgccaatggcacatccccgcttaaagacagcccgatacccaccagtgatcaggacaggcccccgcacctgtgggcggttttccgcagcacctccccctcgctgtccctcctccgcttctccatcttgctcaggaagttctccttctggactgtctcccaggtgacgaccttctggtccagggggtctggcaggtctctctctgggaaagccaggtggcagccagcattactagagcatgtgggcgtcagtggcagagcccaggcctggtcccggggcgaggtgggccaggcagaaggagtgagtggggcccagccagggatggagggcaagcatggccctgtgcaaggacggccaagctgcgggtggacgggctcagctgtgccagcctgcacagagcccagctgaggacccacagggctgaggaggggtccaggtctctccagacctgcctccagcgcacagccccgccctgggacccgccacctcggcctcacccaggtgctcccgcttgtgctcggcctcacccaggtgctcccgcttgtgctcagcctccttcttgaagacccggcggagcgtcaggctcaggtggctgagcaggatgaagggcggggccagggcggggcgctcgtggtactccacaatcaggttgtagcgctggaacttccagaacatgtctgcgttgccctgcaccacctggaacgtgtagctgcaggggcacagctgagccgtcacctaccggctccccacgaccacttgggggacgcatccccctgcaccctgattgctgttggggagccctttttgaaactgaggcccagcactgcttctgcgttgcctctggggtgtgtcacgaggggtccactctccttgggtcttcccctgtccactctgctctcctggacaagcccagagttcttgccacagcaccggtcccccaaagacccaggccctgcttcctgggactgggagggtggcccacagagttcccggtcttgggcaggcaaagccctgcagtccaggctatgccaccttctatctgccctgaggcaccaagcctcaccctctgcagcacaccaggtgggttgcaaaggaggcggtgttggggaatgaccctctgctccctccgctccagggctctctcctccaggggttgggtggagtcacctgaacatggcgatgagcaggttcatgagcagcacattggtgaccaacaggaaggtgaccagcaggaggatgaccagccagttggcatagaggctggggcaggatggtgagtcctccagcagcagtgggtgggtggagcagttcacacgggcttctggaaagcaagggtgctgtggggaccagaccgggggcagccacaagggcggccttaggcaaatgccccgagatagagcgctgagtcctggtgttgaacccaggggacggggtgctggttgggtgacccactgtcccagttcacccagggcggcctgggttttagcagtgaaagccccatcacagcaaaccagaaccagacgggtggtgagccccaccctgggccccctctgccatgtctgctgagcttccaccaggggctggagtcagccaagatcacaggccctggaagtagagccaagacccctggagggatggaaggtgggggacagaggggtcacgggacccaggtttctcctggttgttggatgtgttaaaacctccacccctcctccgaaaaaagcctctgctgttgaaggtttggggagagctgccgaggaaagggagatggggcccaggacttctcagagcctctgcagcactaatgcctgtgattaaaccccaagctggcgagtaattccgccacctttccaaaatgtattgagccagcaggctccagactgggcttgctgcaagctctgagggcaccgaccccgcactgggccactcaagtcaagaacattcttcaggcggcacactctgggagcttgcaggctgagctccctcggccctgggcagggacaccctggaggggtggcagatctcactccagtcccttaaaaccagaccctcacacctgcttctcccttgtagggctcaaccctggaccctcaccccaccccagcctgcggggcaggaggagggaggagggaggaaggagccgcagtgggcgtcagggtgctcagggtcccagccagaggccagagtgtgccctggccgtccaggaccacatatcccctccatatccgaatgggagctccgctctctcctccctccccagcctgcacgctggcgtgtgtctgtgtgagcctgtacatgtgattggatgtgcctggcacacatgctcatgtgtgagtctgcgtgtgagcacactggcacacacgggcacattcaagtgtatcttagtgcctgccagctccaggttgccctgcggtgggttctggggggtctccttgttcccaggttcctgcctctgtgcctgggtcctgagctggaggggtccgttctccctcccagggtgaattcctgccttgtttctcccgagtgagttagtgtgacgcgttggcccgtgtgtgagttattgagtgtctgtgtgtgcactggcagtcagtgagcgccagccctccccacgctcccaccctaggcctgcccctcctctgtccgccctggccacctccagcccatgaatctgttcctgggcagactgatgaccccctctcctccctgcactctggaggagcgggccggggccagcctggagagcctgtttgtgaagccgtaaatctgtctgataaaagcagctctgaggaatgagacccccacaccctccccgactctgtgatttgggaaggcgccaccaggccgggctggaaattaaattgtccctggggcctggagacccagagaacaagctcgtcaccacagctcaaccccagctccggctcggcacgagtgcagagtggggcaggggtctgttctgggctctgaggagacctgcaggctgtacaggaactgtctgagcctcagtctccctctcagcccagcatgtgttagtgaataactctctgcctagcagcatgaggggctgggtcacagtgagtggctggggttcaacctgaagggcccagatacttgctcggcagctgaacggagcccaaggaattgcagctcagggaggggaagtgacaagtctgagactctcagtgggcggccggggctggccctgttgcaggcgtttcagcacggggctctgagatccccgcagcaccgcagacctccctgaggcagcactcggagcaggggcccctcgggagtctgtttccctgccttctcccgtcgagaaggaggctatggccaggcctgtctcctcatacgagtcgctgagactggcccaccagagatgcagccactcaagaaagaggggacccccaaccctgccctggctggaggcgcccgtctagagctcctcctgccccgaggggccctgcggacgggcagtgctggaggccgtatggtgagggcgaggtggggtcgcaggcaggcagggtctggttaaactaatggcctggaaaatgaatgcctgtgatgagcaaacaccaaaatgtcaggaggggctgcgggggctgagaaaacagcccaaggaaatgagccgcgctgggagaggcggtttccatcacggcgtcgcccccgcctgtccccggaggcctgtgtttgctccggtctggccgtcatcccctcaacaaatatttatcgagggtcctgagcgccgctccacagaggtcggggtcaggcctgggcagcacgttgtgccatgactgccccgtgccgggcagccccagccgcctgacaccgcctgagcaatgtttccctgcaccttctctgccgggtctccaagtctgcggcacccctcgagggccccaggggcgggctggctgctggtccaccttcccagaggggtgcgtccctttccaggttggggctcctcactgagtcccagccatcccaggggcctgcacaggtccctgccccaccccagagctccccaccaacccatcactacagaggcccccatggccaagcggctctgacccccgccccctccccactgcactggcttatgaaaaagtttccagagcctccaccagccccagccagctacaggggtcggcctggggacacccataggcatgggcaggccacacacacacattggggtgggtccccaggagcagccagggtgcctttaggagcggccaaatggcgaaggggccttgccagcaggacggcgtaggggctctggtgggtgccctaggccaagcagggccctgtgggagggcagaggccaggggctgtgaggagagctggagggcccagaccccggatgatggctgggacagcctttgggcccactctgtgcccttagtgcctgcctatcccttccccaccgatagaccacccccagagcaagacttgctgcttggcctccccaagcaggaggcagccctggctgccttggggtctccttgtgtctccttcccagcccaaggccccaggtcccaggtcggggctccgtgactggagctgcctctacctcaggaaccaggcctggccctttggggtgtggggggcctggggaccaggcctcagccacttctcccatctctgctccaggctggggtctccatggccccaacagacctctctggagagcctcatgcccagggcttgtgcacacagggctccaatttctccctgcccctgcccccgctggctgtgtgcaaaccatcaatctcgtccagtgggatctggccgaagatctgcaggtagggccggtagagcacccggcggaagatccactccaggcggccgtcatgggggtgcagcagcgcctgggtggtgacaccgtaggccacgagccacacgctcagaaagaagaggaagaagaagacgtccttcatctccacggggcaggggcagagagagggacgtcagcggccagccgggtggggcccaggcagggggttgctgtccctccagggccagggccagggcccccgggggctcaccatgcgctctaccacgatgatcttggggcccagctgcttgtgtatggcaaagatatggatcagccgcagcgtgaacaccatgaagtccatggcgaggactgtgcggccagcctcaaacgccgacggcagcatcctggaggatgggaggctgatgcggctgcggggcccagagaggggcagaggcttccccaggggcacacagcatgctggctgcgggcagggccagggccaggccaggactccttgggccctgagtggcttcatcttttgtttatttatttttaagagacagggtcttgctctgtcactcaggctggagtgcagtggcatgatcacggcttgctgctgcctcaacttccctggctcaagtgacccacccacctcagcctcctgagtagctgggaccacaagtgccaccgccacacccaacctgagtggcttcatctggaagcctgcccacaagccgccctgaggccacacggcctctgggccccacagacctgcaggtgacacccacgatgaacaggaagatggccaccatgtcacacttgttccagttgtcccccacatacagtgtgaacttcttcaccaggtgtgtgtcctcgtctgtgaagaagccctgggagggaggtgggcagtccactgacagctgtccagccgccctcgctggggacagccctacctggacaagcttggatctgtaaggatcagggttccatctatgaccagggccgaggctaccagtgggactaggggtccactgaagctattccagggctgtctggggacagaaggtgaggtcagtctccacttggggccagggcctctttgtgcccagggtctagggatcagtttatgcagtgtctggactcagtccgtgatacaggtcagggttcagactctgacgagggagaccatggtcatgctcagtctggagcagggctcagggctcggtctttgaccaggatcatggccgctggtgactgggaagatgggaggcccccatgctgttcttgttttacagttggggagccccaccctgcgagggcaggacccagcttaggttgcccaacctgaagctgcagagtggaggggacctaggctagtgtggccaccgacctgccggatttcctccagcaccagcgtaaagacccagaagtagagggtgacctcgggccctgaggggccctgggggggcggcctgaagtccaccagcaggacgtaggtgaacaggaagaggaaggcgaagtacatgaccacgttccccaggaacacagtcacgggagcgccccagaatttccgccagcgtgtgagcaggaagacagcacgtgggcctcggtcaccctgagccctcggcgcctccaccagctcctccaccctgtgccgcagagaagttcgcagtggtgaggctggcgcccagccgggtgccccaccagagtccagcctcccagccaccacccgccagtcccctccaccctgcctggccctgtgcctcgcaccggctctgcaggccatacagcgggctcttctccgtgtccaggctgtccaggtcctgcaggtcctccaggcctgtcctcaggggagcttcctcactgcgagcacaggagagctcagggcccgcaggaagggctcccagaggcgcctgcctggctccaggcgcttggccatcaaagtgcccactgggatgcaggggctgtggggagtgggacccgcagggaggctggacttgggggctacagagtcaggctaccaccagcacctgcgaggcccaggccctccccgtagctccggcactcgcactgctgcctgtcctggccgggcagctcacaggcctcacccacctgaaggtgatgaggttggtatagacgagggcggggcagaggaaggctcctagcagccgcaggatgggcgtgcctgcggccatgtccccccaccagatcctggtcaggaaggcctgaggtgaaggcaaaactgtcggctccaactctgcacctttgcccaggctgcgccctgccccaggaatgcccttcccccaggtgcctggcccacgtgagctgaaggggtgcccagcccagccctccctcccggagcccccgtcctggtgggcatgtgctccttgggccactcatcccaggggtgtgggttgagctgctgtacccttcactagggaaaagattgggcttgggggttggggaggactgagaggaggaagtgccacttccactgaggccagaggcaggaggagtgtgcctggtggaggaagccaggtgggcgccttccaggaacagaagccccaccccgccccctctgtgctgaggacgggagtgacagggcagctgcaggctgggaagtcaactcaagctgggcccagctcgcccgcccaccccacccctggcagctctcctcgaggacagctggcactcacctgaacgccgtcgtgggcaaagaaggccttggcgtcagcctcggtggccaggtgcaggcaggtggtcttgctccagcagcggttccggcgcaccagcagggcgaaggcgcgggcctcactgttgctgtagcactcggagaagaggtctgcccccggaggccctggccgctaggacgagacgccgatgcccggcccggcccccgacgcccctcctccatcccctgcccagacctgggctctgcagccgcaccctgcgttcaacacgcagggcccagccaggccttctgccccctccggcctgctccgggcccttcctgaacctccgtccttctccggctctgtccctcccccagcaggacaaagggaacctctgccacgctaaatgtccctcgtcctgcggcagggcccagtgtatgcccggggtgtgaggctgtatcgtcctcaccacgtgcacagcggtcccacactcagggtctggggccgcctccaccccaggcagagccgtctgtcctctcctacggaggaggcccctgagggcacctggagccccacggcggtaacaggcagccctggcgaggcccaggacccttcgtccgacccctccgtcacatcctcccccgccgcgcgggcccggccccagctgccggtcactcaccgagggccagctgctcgtatttcgcctcgcgcgtggctcgggccgcctcggcctccgtctccaggtgcgacatctctttgaggattttgcaggcggccagtgcggctgccacaccttcctggccctacgagacctggtctcaggaggccgcccctcccctgcccccgcgctgggcccgcggcctgggctcaccatggcccagaagtaggtggccatctcgtggcggttctgcagcacggcccacaggaacaggtcccgccaggggttctcgctcttctggttcaggtccagcagccacttctggcccgtgggccgcttggccgggcccttctcctggaggacacgggcgtcggcctcctgctgcggccccagcctcgccctccatccccacggagcccccgctcaccgccctcctgcggtcccctggccggccgtcctggtagaagcctcggcaggcgtcctgcaggaagtccttgagtacgcgggagacctcgtgcagggagaaggccggtggccccgcgggtggctcccgggcctgctgggtgcccaggccggccagcgtcagccgggcctcctcctgcttccgctgcagcaggtcgaagagcaggctcttgcgtgacacggagcggtagagctcctgcagccgcccatacgtcaggaagtcggccacgtctgcgccgttgtccacaaagaggcgcacaaactcgggcttgttgctgaccagggcgtccaccatcacctcctccaggtcacaggacttggcggccatgggcacccgagggaagggggacaagagagtgagcgagagacaggaggagggggtccaaggaaggagagagcagggagcatggggatccatccccagggccaggtcacgcagaccctctcgctctcctgcaccccagcctgccccctgcattggggcgggcacagaggggccagtcgtgagcaaatgctgagggtgtcacaacccccttgggctttggggacagccggcacccagccagctctgcctgggccagtgagcgaggcagaagcccgggcagaaccgtggcctggtcttgccccggaccttgggacagctgggcagaacgggctcagccaagcagcccacagggtgcaggagcaggcagcgtgggcagctcgggcagtgccatgatggggaggtgggtaggcagggctgggaggcaccttccactccacgtccccattgaagatctcactcttggcgatgtccacgcggtcccaggccacggccagcttgagctcatccagatagtcctgaggctcctggctgtggctcttgcaggctgtgggcagagcaggcaggcactggtgagggtggagctgagggcctcacagagccggggcacagggtccccaaaggtgcgctgcctagagacgcggaaacgggaacttcacgctgggacttgagggggcacatgcgccacctctgagcaccagcaggaggcacgagactttgtacaaaccgcaggagaaagcgtgctgccctggtctgcgtcgggacggcccgtctgctcccatgtgaggcaacttcctcggctgcaacgggggtaccccagctaacacctgggcctcgaggccacttcctggcactgaaggtccaggacacccttcctggatgttgtcgggggagcaagctgggccacgtttcctccacgggcaagggcatttggccatgacttggtgaggtcaccagggtcactcaaggggggcctgcagcacctgggctgggtgcgcctgctggaaaccgctgtcctcaccagactcgcacgtgaggctcaccagcctcagcctccacaaccatggaccccgtaagactacggtgcctctctcaggccactgggaccaaactgagactggtgagaagaggcgggggagttcctaaacggggaggtttctttgacctccttgtcctggtgaggtttctaaacccagagccacccgcagtccagacacccttcccagagcgtcccctcaaggtgtccccagcccctgcttagcagtgcctctccctgctggggctgtgtctgcctgccagcgtccagcccttcagcacgcgttcgtctccagcaaaaagcacatcaaatgctcatcaaaattttccatcagcgggtgaacagacgcatcaaccacggtctgtccacaggctggaacctgactccgccttacaaaaggaatgaagcatggaatggcatacgcttcaacacggaggaaccgtcaaaccctcccgctgcctgcagggaaccatggacacgaaatgcccgtcagcaaatctatagagacaggaagcagatcgatggttcccaggggctgggggaaatggggagtgagtgccaaggggtatgggctctttctggggcgatgaaggcttctggaattagataaaagtgatggtcgccccacctcacgaatatactaaaaaccactgaattggctagtgcggtggctcacgcctgtaacctcagcactttgggaggccgaggcaggcggatcacgaggtcaggagatcgagaccatcctggctaacacggtgaaaccccgtctctactaaaaatacaaaaacaaaattagccgggcatggtggggtgcacctgtaatcccagctacttggaaggctgaggcaggagaatcacttcaactcgggaggtggagcttgcagtgagccgagatcgcagcactgcactccagcctgggcgacagtgcgagactccgtctcaaaaaaccgaaaaccaaaacaaacaaaaaacaacccccccaccaaaaaaataccactgaattgagagctttaagtatagttttaagttgtggtaaaaaacacgtcataaaacttgccaaatacagacagcttcatgaatcatgtgtcatctttcctgggaaggggcaggcggccgagcgtcacaaacattggccaggctgccaaaccccaaagcggctctgagcatgaagccccccaatggcgcctgccttgcccaccctgcccgccctcacctttcaccagcgccttcaggatgaccgtgtccagctcctcggagccctcctgctcgaagtcatacacggtgagcaggtgctggtgtgaggtgatgttctgcagctgggcaccagaacagagcccccatggggccgcctcagccaggacgggggcagaggcaggccgtggtagacaccagcgtaggcacaggcagcgtccccaggtgagccttgcagcctgcatgcccaccgcccaccgggcccggcctgggaccacccgcagaccaaggggctgcctgggtctctctgctccctgtgggcctgaagcgagagtgggtggggggcccagcagcctgaggtgggaggagtgggctggaggctgcattgcaggaactctcccagaggaccagccccacccccggaggaggggtcgggaggacaggggagggggcagcacataccagcttggtccagcgcacgatgtcctcccaagagaaatgcttgctggggaacttctccttaaactgcttctcggccaccttgggcaccaggaggtggggctggttcactagggcagcaagcacatcggcgatgccccccgagcctgccaggatcagccacggggcagcctgctccacggccctggagatcctctgagacggggagggaggggagagcggaccccagattagcccgacgacatctggatgcaggtgtcaggggtgcccccatcccttcagccctgtcccaggggtgcccagaacccaccgcacccctccacaaggcttcggccagccagggggcctcagccaggcccctacctccaaggtgttgggatcaccattgaccagcaagcagaggacagggatctcgatgctgccagtgcctgtggacagggcacccgtgaggcctgaggaccctccgcctggggtgaccacccggatctcaggctctcaggccaccacattttctggccaaaagctggctcttccgaataaagtgtgggcttcgtctgggccacgtgacacaggctgcttattacagcccctgccatatgagggccgagggctccaatgctaacctacactacccagcacgcgcactttgtggcaacagctggcatatggctgttaaaacacaaagtgacgtggaagaaacggagcacccagccctacaggtgcactgccacactgcacgcgctcatgctgagcatggcagaggcagcatctcgaccatcgagggagctctgctgggtgggctgcgcctgaccactcagcaaactgaagaagtacaggagggagtcttcaggtttctcccccaaacagaagctggaaatgagatgtctatatgtgaagcccccagagaggcctggacctgcccctgtcttctgtgagggagtgaactgcctggaggtgccttagaatcacccacagggaactgggctcgcaggcgggcccctgactttgaaaggtgcctcctgattgaatctggaggataaatcaggcctggccaaatggtgcccgggccagcggggcttccgcagagcagagccagaccctctgcctgtgtccccagagtttgatgagactttgtgttttcaattctaaagagtgctcagttgaccgggcacagtggctcatgcctgtaatcccagcactttgggaggccaaagcaggcagatcacctgagatcaggagttcaagaccagcctggccaacatggtgcaaccccgtctctactgggaaaaaaaaaaaaaaaaaaagagccgggcatggtggcacatgcctataatcccagctacccgggaggctgaggcaggagaattgttggaacctgggaggtggaggctgcagtgagccgagattgcactcctgcactccagcctgggggatgggggacagagtgagattctgcctcaaaaaaaaaaaaaaaaaacagagggctcagttggccttgccaagaaattacaattctgtttctaaatattgtatattgttcatagatgttataaataattatatgctttgtttatgaatattatttacacactagcgttttcttagtaagtccagcttttgaacgtgcgactggccagaggtgcccatttctcgggtgacgctgccctctggcggcagcatacctcacgcctggcggcgggaagtagccctctttcaactcacgatctcattttgcctcttagagtcccggagcctctgaccacggcaaggcccagtgaaaacagaactgcacctgctctggtgggaatgtcactgtccagtcagagccactctgtccagctgtgcctccttcaccactctgcccagacagctcctcctcccaggcccccacggcccaggcccccacggcccaggtctcggtgctcaggcatgcggggtgcgttctgcctgggaagccctcccccttctccctggcggtcacccccactctcccacaggcgggtccctggatccccactgggtcccaaggcttccctgggtggctggggcgggtctcacccccgtagcccgccctctgctccgagatgtgcttctccagcctcagccgcagctccgtcagcccatcgcccttccccggggggcctggctccaccaggatgaagtgggagaggttgctgtccagtgaacagagggggccctggctgccgccgtcatcctcagggtagtggacaggaaaatcctcctgcgcccatgcagggagacgaggctgagccctcgagaggcagcttgggctgggtcccgctgcgggatcctccctgccaggccgtgcacaccacgccatggggccccgcacaaggcttctgcccgagccttggtttccccacccttcagacaaaaggagggacgaacagctggggcccggggaccctccttcgacagtcaggggcaggggcggtggggagcgggttcttttagacagaaccatggagacagcccaggctgccgggagcacctccttcccgactctagggctggcgtccaaacatccaccaggggctgcccgggcctccctcggtagtgccttagacagaccccagcatgggggacggaggctgcttgcccaggcttggaaagggctcggggcctgggcccgtgtggtacaggagggggtgagggcccgcgccacagtctacgctggccgttccctatgcggtactgccacctgccggccgtgtgctggctctgcccgctccctgctcttcctccagctcgagtcctgtcctcccagagctctgcccgctgcccaaacccttctgagcccctgcctccaggcccccagcggtcgtggtgctgggagctggacgtgcacctgggcctcctccagaatgcggcggtgcaggacgcggcccagcgaggccatgccgacagcaaccacacggaccttggtggacgtgctggccagcgagtggtcgcgcacggcctgcccgacatgcctggccaggcccacgcggagggcactggtcaggatccaggctcctgtggggatggaagagggcctcgttgtgccgcacgccccaggtcttccctagctggccccacgccctaacccctaggcccaatcagcagccagttacctgggagccaggggtgggtgctggggaatgcctcacggtggggtggggaagccgaggcccagagagggcaaggcacccacccaaggctgctcagcagcagaactggctgggcccagaacctgtgaagtggcacccccaccccacctggagcgcacaaactgggctccagtccccccaccgggctccctccgggacacatccgacacaactctgtccagctgcctctgctgggtgagaatcccaggatgttttcccaaatgacaaagccctcggcccttgtctggctggaagatctctttgggtttgccacagtcatttagtgagggatcctgaaacctcaagtccttttctcctgggtgttgtataggccaagctgcctcaaaaaacagcccagccattggactctggcccctgcagctggcggcccgactgcttccccaaggggtcccaccctgtatacacccgggtgctctggtcccaggtgagtgggagcagggacatctcatggcggcccatgggccctgctagtggagggggcagctctaaggaagggccaggcccagctgggggaggtcctggtccagtacgtaggcactgctgcacctgtgggtactgcagaggacgggctgagagtttcgggaaatgttctcgtgatggcctggagagtcagggggtctggctgccgtgtggggtgggagcattgcctgtgccgggtggggggacagtcagggggtctggctgccctgtggggtgggagcactgcctgtgccgggttgcggggacagtcagggggtcgggctgccctgtggggtgggagcgctgcctgtgccgggtggggcctcacctgtgctctgagccgccttcaccagccccttgcgcagcacatcccgcagccaggacttcatggcgaaaggctgctcctcacccaccagggacaccaccaggttgggggccggcaggtgccactcagcaagcagcaggtcaaagagcacagacggggccactccgctcggcacccgtacaaactgcaaggcaggtctgcagctcagggctttcggggcacggggcatgggagctgctgggcattggggggggctggacacaagggggcactggggaggtgctgagcatggggggacactgggcactgggaggtgctgggcatcaagggggctggacacagggggtaccggggaggtgctgggcattgggggcaggtagcaggaggagagtggcccccaatatcccttctgggacagggccagtcctcccttgacctgctgtgtgacctgggcagtcctgacccctctctgggctggcatccccctcagtgagccgagggcgctggacagaggtggggccctggatgcacttgaccttgcacctccaaatctctcggggggacttcaggcgtcccggttattgcagggaggtaggaggccggccagagccactccttccagctctggaactctgcctgtctgggggctctgaatatggccccaggggagcagaccccaggggtgaggaggaccctggcactcagcttccagggaaggaaatggggcctcatgggttccaggtcaaggcggacatcacctgaggcctggggcctgcccttaccttgcctcgcttcttcccagaccctccaaagttgacctcgcccctgtgcaagcccagctcccgccggtcttcagcatccccggggcttccgggacgggggccttggacatcctgcatggtggcctctagagctgcagggataccctggcccttgagggctgagaaggcccatccccacctccctcccctcagggggctggctctgctttcccctgggaagcccctctccagccaacatgcacaaggagacctggggactgcccccaggcatctctgccccagggaccttctctccagccaggccctgcccagcgaccccctgcagctccgacactcgctgtagcaccgccccaaccaagctccttcccaggtgaggatgggatgtgtggggctccgctgtcagcgcctggttcctctactcaccccactcagggcacctcaggttggccacacctgcagacatttctccagaggccttttgtggggatgacctggaaactccgaaagactcagcagaggccttgcagtcccctggccacacagcccacccgctcccaggacagggatgtggagaccctgggtgcacctgggtagaggtgaaaaggtgagacaggtgccctcagctcaagtgcaggaggcggtgtggacgagagaccaccttccttgcccaggaggtccaggaggcccaggacacacagagagaggaggccttgccccggcccacacagcatcagcagcagagctattcccgtggcgctcccacatcagcaagcgggggtagaagaggccgcgtgcgcctcagccctattccctcaaccctcatggggctcatgtctcccagctgcccggtgaggtcgggcatctcagcccctctctatgtggcagggatccaaggatcggcactggcccctcagcgccctggctccgcccctgcccacagcctcatctgtcagctgcccagccccagcctggctgacctcggtctggcttggtcccacctccctccgattgctcctctgaaaactcaatattggaagctggtgcttgaggacaagccctggcaggccgagggcacctgctcctctgtctgccctcctggaaccacgcgtcgggtcacaggccgctgggcagaggtctccgtgggcccccagccaccctaccctgtccgacctggggctacctggcagctcctgatcccacagggctgtcccttggttctcctgtgcccaccttgtacccaggcgctctgggctgtgtccaccacagaagccctttgtgagaagacaatggaccgttctgtaaaaaccttcatttcctagagaggggcccacctgtgaccccaggaggggatacaggagttggggggaacttcagagatgagagggagtgtgtcctgggacccctggggctggctttggggcagaggctaaggccaaggccctccccattaggcctctggagccagcacagttactgcatccccaaacaggtatgtccaagtcccaaaccccaggacctgggaatgtgacctttggaaacaggccctttgcagatgtattaagatgtaagtaaagatgaggccatgctggagcagggggagccctgattcccaggttctgatagagaaaggggacatttggacgtagagacagacgcgcagggaaaaacaccctttaagacacaggggaggggtgaaggcagtggttgggtgatgtggccacaagccaagggacacctggagccccgaagctggaagaggcaggaaggatccccctcgagggcttggccttgccgacagtttgacttaggactcagcactggtggcctccagaaccatgagagaatcaattgccattgttttaagatgcccagctcaggctggttgtcttggctgcccagggcccccctgtgaggcccaagtcaaccccggcacgacttctggtgactgccagccccaggcaggacccacccacgggcctcagccccctcctccggccaggcctgtggaggcgccctgatgccctcagcaccacgtgggcctcagctgtccctgcagggtgatgcaaatcctcccgcacttctgcctccagagcaggaaccagcccgcggaccgcagagaggcaggatttgaatacggcctcccgcgctggtggagacgcctggtggttttctgtgttgggagctggtgtctgtggccaggccccaggtgggggctggaggctgggacaaggcttggcattgctgttgtgtcccggggctgccaaaacaaagggccacactctcgggggctcaaaacaacaaatggatgatctcatagttctagagcccagacgtcccaaatccaggcatcggcagggccgtgctccccctggaagctctcagagcgggtccttcccaccctttccaggttcctgaggcgccaggtgttcctggctgtggccgcgtggctccagcttctgccttggttgccgcatggtctgcctcgcctgtctgtgtcctctgcaatcattgattgcccaggcccgccctaccccagtgtggcttcatcttcatggtgcgccatctgcaaggaccccacttccaaacgaggtcatattctaaggttcccagtggacagtatccaaccattagtgtcgccccatctgggaggacaccacttaatgcagaacaggcagggaggtgggatgtgtgcttgtagccctgggcgggagtcctcaccctgggcgggggtcctcaccctgggcgggggtcctcaggctggccttcactcccaccaggccctgccacacctggtcacccgctggggtcaatcctggctacatgtggacatgtgccctgcagctggggatgcatggccaggcgtgtccccagcacagggtgtagggggcttggggtttggccatgaccctcagcctgggggacgggactgggctggacaacactgttatcctcgccttccccatgactcttaggccatagatgggggactccttcttctcttcccttcgtccctggtggggaagctaatggagggcctgggccttgggaggggtcctacagggctccctggcccttgaattgctttccagtgagcctcagctttgcctcttggaagttctgggataggacatccgggagtacccttcagcctggagctcggcagtgcctccctgactctatgcaagacccccgggacgaccagcagccatcagaggtggaagcagccacaaccaaagctctggcccttcccagggcccacagcacctccttcctcccgaggacgggacagagctgggcacccagcagctgaggtcagggaagccgagtagcagcgtggggcagcctcaccttcctggtggccgcaaccaccccttgccccatgcccaggctcggtgccccccgcccccgccggccagcccagggactaaggaggcatttggccaggtgctaggcaccaggcaaatgggcccagagggaggtgatgcaaacagctgggatttgcatgagcaggtgcccaggtcttctgcacccctccctgtgcatcccagggtggggcagggagcccgggacagccaggggccatcgtgacccctggccagaagtccaccccagaactcccaagaggcaaaactgaggcagccccccagacggtgaaggcgctggggctcccagggcagcggggcacctgtagccgcagccaagagccaaatgtggcttcctgggccccccaagaccagctcagggcagagctggatgaccaggccctggggtcccagccccgctcatccccaccaggctgtgtaactttgggcaggtccctcagcctccctgggcctgcctcatttgtgagatttgggggaacggccagtcacaaggggagggtgccagaaaggtccctgcgtgcagcaggcgtgaagtcagctgtgtgtccttgtgtcctccctatgaggatgccccatctccctgggctgcagtggaggacacggctcagggaagtggtggcaagaggacacagtagtgacctggtgaccccagacccctcccactgccccactcccttcgccctcagcttctgagccgcacctgcctttgcaggctgctggccagacactgcccctgaagtctcagatccagagcccgtggggctggccctcctgcccagaccctcttccagcactgggcagccccttccagaatgccccacctcaccccagtggggccggcccttcacagcccagggaagcggggatcctccctgctaaagataaggaaactgaggcaagaggcaggggtgtggccaaagccgcactgtcctggtccccactcctctcatgcccacctgcccttcccacctgggaggaggaggtacaatcctgctccttctccccacctgggctgtcagcggtgtgagggtccctacctgtctgccttctccccagcaccctgacacgcggctgctggccaaggcgcgggtggagccgtctgcctaccttgcagggtgtgcctgtgggcccaactctcaagcctctcctcctcctcttccccgcccacaactcctggcacctgggcagccaatgccagccctagggagctggccatgaaccaacacagggcaccacctcacctgctccacacggccgagcccacaggcctgctgtctccaaagccacccagacaccaagggctggccgtcctcaggtgtgattggcaccaaggccctgggggcatgtccgatttgactgggagaggagaccctgtgtggacgtggcttctaggccacttagattgctgtcgttgcctcctttggcgatgtctggcggggtggcccgggaccgatgcagctgaaatccaccctgaaatgtgatgggacagggctcttcacctcagtttccacagtaagtaggaacaggagctgcctcaagagcacacgtctcatgccggggtgctgggcccagctgtcctgtggaggacagggaggcagagggactgtctcctccctgctgtggccctgcgaggccgtggggcatcggcccccatggtgtctcatctgtgctggaaaggctgcacagccgtgggccagctgtgagtgatgtccattcaccggtcagcaccggggatgctctgtgaggactgtccctgcatccggagtcaggacagggtgccagtgggacagagtgtgcctctggaatcccgcagtcctgggattggatcctgcatagctgttgagctacttagccacttgggcctcagtaccttggagtgtcaaacagggactctaatagcctggcttctgggaggttgcaggtaacacatgaggagaacagagcctgggggatacctctgtgtgccccttcccaaagagactccaaggaccccctgttcggggcccctcaaaccataaactccaggaatggtgggggacagtatctgggacttgctctctgggaccctggtggcctctctagtctggcctgtcagccaccagagggcgctaaaggaccatgggcagagtctgaggcagtggtggtaacgggtgaaggtgatggtggtggtggtgatgatggtggcagtagtggtggtggtggtgatgatgatattgatggtcatgatggtggtggtgacaatgatcatggggaccgtgctgatggcggtgtttgtgatgatggtggcggtggtggtgatggtggtgggcatgagggtagtgggggtggtgatggcattaccgttgatgagggtggtgatgatagtgatggtgatggtggtgggaatgatgacgaagatgatgatgatagtggtgcaaatggcagtggtggtggtagtgactgtggtgttgttgatggtattagtgctgataaaggtggtgatgatgatgatggtggtgggtgacgaaggtggtggtggtgatgattgtggtggggataatggtggtgatggtggttattgcagtggtagtgttgatcatggtggtggtagtgatggtggtcatgatgttggtggtgttggtgttggtattggtgttggtgatggtgatggtggtggtaataatcatgggatgatgatagtagtcatggtggtagtgacaatggtgacagtggaggggatggtggtggtgataatgattgtggtggtgatggtgatagtgttggtactggtggtggtgatgatggttgtggtggtggtgatgatagtggaggtggtagtaatgatgatggtggtggtagctggtagtggtggcagtggtggtgatggtgatgattgtggtgatggtgatggggtagtggtggttatggtggtgttggttgttatggtggtagtgatgatcatggtggtggtgactatagtcactggtgatgctggtgttcatggtgatggtgatgatgatagtggtggtggttgtggcagtgctgctgctgatggtggtggtgatgatgagggtgatgatgacaatgagtatgatgatggtggtggtgatgatcgtggttgtggtgtgttgatggtggtgtttattgtggcggtgatgatgatagtgttaataattgtggtgatgttggtgatggtggtgatggagacgatgatggtgatgattgtactggtggtgttggtgatggtgtggtacgatggtggtgctgatggtcatgatggtggtgggggtgataatgatcctggtggtggccatggtggtgtttttgataacgtgataatgttggagatggtggtgattgtggtggtgataatggtggtcatggtgatggtgatatcagtgtgggtgatgtagtggtggggatggttcagatgttggtgatggtggtggtgatggcagtgatagttaggatgatggtgatgatgatgatggcatgggtgcttgatatggtttggctctgtgttcccttccaagttgtaatcaccataatccccatgtgtcaaaggcgggaccaggtggaggtaatcggatcatgggggtggtttcctccatgctgttctcatgatagtgagtgagttctcatgagatctgatggttttataagcatctggcatttcccctcactccatcctgctgccctgtgaagaaggtgcctctaagtctatggagttggggggcacagtccttcatctatcctggtccttccctccacctctgtctcctggacacccaaaaaaactgcagaagttcttccccagccaactctggttcagtgccaggtcatgttcctccccgcctacaaccttccatggctccctattaccctgacaataaaacccaaagaagccttggagccttggcttctggtgatctgctaggatcacttttccttggaactcctgctggctccctcttgccactcagatactggcagaacctggagtgggtgctggcttgcactcactccatcctgctgccctgtgaagaaggtgacttgcttccccttcatctccgtcatgattgtaagtttgctgaggccaccccagccatactgaactgtgagtcaactcaacctctttcctcggtaaattactcagtctcaggcagttctaatacagtggtgatactagtggtggtggtggtggtggtggtggctggttgtggtaattacagtggtagtggtgatggtggtagtaatgatgatgatagtgctggtggtgatgttggtggcagcggtgagggtggtggcggtgatggtgacggtgttgatggtggtggtggttttggtggtggtgatgttggtggcagtgatgagggtggtggcagtgatggtgacagtgttgatggtggtggtggttttggtggtggtgatggaggcggtgttggtgttggtggtggttttggtggcggtgatggtgatggtgttggtggtggtggttttggtggtggtgatggtggtgttgatggtggtggtggttttggtggcggtgatggtgatggtgttgatggtggtggtggttttggtggtggtgatggaggtggtgttggtggtggtggttttggtgatggtgacggtattggtggtggtggttttggtggtggtgatggaggtggtagtgatgatggtggtcatgtttatggtagtgatgacagggatgatgctggtcgtggtaatagtggttatggtagcaggccatgttataacgctagcagctttgctctggatgggaaggctccaggtactcccaaagtaggcacctatgggctgctctgtaaatgtccctttgtcccctagcatggctgaaaccctcatcctgagaggagaagcagatatcagcttcctcagtaaatgcaggttggtgttgagctcagaaacccagaacttggctctgagcaaatgggactcagaccagggaccccacaagccctcaggcctgagaccctaaaatcctagttctgagagcgaggggcctatcttgggggccctgggcaaggcggagggtccactagaccctgaaagtccagcctaagctcacatccactcctctagcctgtgtcgttgccctacagcaggttctgccagtgtctgtggtatgtgaataatgaggaggttcccccagatcctctaagcctatggggttgggaggcacagtccttcctctatcctggtcctgccctccacctccatctcctggacacccaaaagactacagaagttcttccccagccacccctggttcagtaccaggtcatgttcctccctgcctacaaccttccatggctccctattaccctgacaataaaacccaaagaagccttggaaccttggcttctggtgctctaccaggagcactcttccttggagctcctgctggccccctcttcccactcagatctcagctctcatgtccttcctcagagaccccctcaccctagaccacatcagcacagggtgcctccctcggtctcttcccctgtgatctggtgttagttttcagtatgcctcaccctctgaaaggtctttcatttacttttttgcttgtctgtgtcccctgcatgagactatggcctgagcattccctgccacctccctggggcccagaacacgcaggtacagaccacatgttctaaagtcaatgaatgaatgagtgaatcaatgggtgagtgtccaggcgtgtctctgtgtgagcactgccatcaaggcagagacggaggtgtctaggggaggctgcatttttgcaaggagcaacttcctggcccacactcacgccctgggtggaagggcagacactgggccggggctccactgtctgcccgctctagccatgggcactgctgccaggggaggaggtgcccaggcgctcacctgcgtccatgcgtgctgtcatgagggacatcccagctgccgacagagcagcctctgcctgccctctacagcgggtttcctccagcggcctctgtcttctttgctacagttggccccgggcaggctttacgttggaacttcctttggaggagaggccacgccagtagagcaggactccaacagggcccagcccctgcccccacggggcctctatccctgggacagcagatcccctttggatctccagcaaccccaatggctgactgcagaggctcagctctctcctgccaagccctgccatgcgaggctgggcccacaggctcagaagctgaccccagtgtccaggagagcgtgagccgtccctgaccggggtcctcgggcctctgctgagagagaaggagctgcaggctggctccccacctgcaccacaggcagcctccccccaggcacatccttgggtgccatgtggcattttatttacagaaagatttgcaacccacttcttctttgtcttagaggggagaaaccaccacccagagtagggcccgctggcccagggtccccatgccagtgtggtgggcgcccccaacccagcatctccctctgaaccacacacagtctagccccaggtgggagggaagcagcccggagcccctcagacaggaaagctgatggtgggggcgtcaggtctgacccctcggggggcagcccgaagccatgcagtggggcagcagggccatgggcaagctctgccagtggtgcctgtgtccaaggcctccgggcagatcctgagtgcccagcagtggagaccaggagtccgggaaccagtggagccgcac

SEQ ID NO: 47 - DNA, 21696 bp, Homo sapiens
cacagaggaggaaattttaaaagccaactaacaggtgaaaagatgtttaaccttagtcatactcaggaaacacaatttcaaaacaatgagatgtcagttttcacttatgatgttggccaaggtctagaccaacggataacatctagagtcggccagggtgtggggaactgggatccccccacagtcctggggcacatgggaatcgctatgaataaaatggcaagccctattcacaatttaaccacagctaccctttcatccagtgatcctgttttggggaatttatcctaaacccagggagtaacgaaactactgcttaaaccattcatgcaggaggaggcttattagagcattccttgttcgagaagaaaaataagccaaaatgtctgtagagcaccctttaaacaagtgaataaaggtccacaggaaacagtgtacacagtcacagagcgtgtgtgctaactctgtatgtatcaccttggaatgatgtctgttcgtacatttttaagttcaaaagcaagttccaagcaatgcatttcatctcaccctctattacaacagccccagggattgtccccattttatagaggaagctgatggctcaggcgtgagtaaccaccccaggccagtgcccagcttgtgtcagaccttccgaggaagccacatctgtctgacccagcaaagctgcagggtcctctctctgggtgcgtcattcgggtgtattgtcatgagtgctgggatgaaatggaaatgaacttgccaaattattaacccactctgcctcagtgaggttgacttgagccaggggtgggctgggggagggagacaggggagagactatccattttttccttatatgcttgtttattctttgaattgttagaacaaacgtgagattttcatagcaaccacccaccactacaaaaccattaaaatactgcttaaagggtgaggtgcagtggctcatacctgcaattccagcactttaggaggcagaggaggttggattgcttgaggccgggagttcaagaccagcctggccaacatggcaaaaccctgtctctactaaaaatacaaaaatcagccgggcgtggtgacatgcacctgtaattcctgctttttgggaggctgaggcgcaagagttgcttgaacacaagaggcagaagttgtagtgagctgagatcgtgccattgcactccagcccaggcgacagagtaatactctgtctcaaaaaaaaaaaaaaaaaaaaaagagagaaaagaaaaggtggaagtgggaggggcaggcaggactcagaatgatgcctccctgctcatcctgcgtggcatcccttgctgccacctccatctcagtaactcagccccacgtggtgctcggaagagcccttgggagagggtgcgtgatctcagggcgtggcagcttagtgggggactttccccaaagactccttctctaggctggagtcccttggtgaggacgggagcagctgtttctaaacctccctctccccacaagcttaagcagcacaggctgcctgcaggcactttggtcagctgtgtgtatgcgtggctcccgtgcaccgaggatgactggtctacctgggcaacaacagcagggataataagctccgtgggcgcagggttcctgcctgcgctgttttccactgtatgcagcacttagcacaggacttggcacatatagggcgaactaaagaaccaaagcagggcatgatggtgtgcatctgtcattccagtttctcaggaggctgaggtgggaggatcgctggagcccaggccttcgaggtcagcctggatagaatggtgagatgacagaaacccccacactgtgacgagggagggcaggagaaggtgagtgtccatggggcactgttgaggaatgaggtgcattgtcagatggacaggtggagggagggtgtccgtagcagagggaccaacatttccaaaagcagggggtccggtgcatggcgagggggaggctggagtgctcagggacagtggagccctgaatgccgagctagggaattgagctctattcctgggaatcctgaatccctgatgaagttggagaaaaggacactgatggaattaggtttgccttttagagagagcccctggggacagtttggggaccagattggaagggtgccaggtaggaggcaggaagagcagttggtggcgggtgggggggtggggtgccctccagagacagaaggagagcagttcagggatattccagaggtggcttcaggaggcctggtgaccagcagtgggggagggagtcaggggaatggggcaccagggctgctgctggggctggggagggcagtgctagagtcagtacttcctggcactgagattttttttttcaatttcttattgctgttgttttcaagaactcagtttggattttattataaaattgattaaaaacacattttttggaaaaaaaaaaaagacaaagagtagcttttacaatgaacttctttgggaactttctcaggaagtgggaaagggcctgttgttgtccaggctgtggaagggatggaaaggacctagagcccacagaggtccctgaggtggcagcagggcagggcagagtggggtggggggaggaatggaccaggcaggtggggacgccaagtcccgcatggcacccctcggcgggctccctccccagtgccccctggatgccacacctaagcacggatgtggttcccccaggagtcccccagggcagggcagggcagggaccctgcagaggaatgctgggtaggaggcagctttgtggtcagacagacttggcttcctcagaaggtctgacacaagctgggcactggcctggggtggttactcacgcctgagccatcagcttcctctgtaaaatggggacaatccctggggctgttgtaagaattaaatgagaaaaatcctgtacagcatttagcaatgcccagcccttaagaagcccttggagaggagccccccagggattgtcttagtgggtctttgaccaggtggtgtggctcacacctccaagctgtcccctctacagagggggttgggtgggggtgggagaggagacctcatgccttccgatctgtcctgggcatgaggtctcctcttctccatcacggatgtcccacccactcccacgggttcaccatctccctggacaccatcctccattttcacccatggcctaagacgtcctgcccagccccctccacagaaccagctccttgtagtcatctgaaccgggcatcctgggggctctcaaatatacctccaaacctgaccctgccatcctgcccctacaccttggccaagggtgccacgcccatcaggctctttgcctccctgtcccctatccaataggcctcaattctgctcaattctgcagccactgccctgtgctctgccttaggggaggacgcggcagccgctcactggccactccagcctcctaggtggtccccctgccctcaccacaacctctgctccactggcagccggactgaccttttggagatgtcactgtctccctctctctcccctaaattgttgaaaatccttcaggactccaccaatgccaaggtcaaactccatgcaaagcatcacgctgcctcctctcccaccatcaatgcatcagcctttccctggacctgcagcagcccccttgcctctctcccctgggagggggactggcggcaggctcccccgcatggagtctgctccctcctgagtgtgcccggcaccggcataaggcagactgccagtaaaagagggctgaggacgggctggtggtgctcgggggttctgtcacctgagcggtccctcaggtggctgcattcctggaatttctcttcttctgagccctcaggaggccgtagcggttccacccacccaacttggcccatattgctccagggcacctggagaaaggaccccgactgtcttgggaagaggcccacctgcatctggcctccctagccctcagatctgcatgaaacgtggctcccactactggctgcctacaggggaagcggggccacaggctgagtggtcactgaaattcactccaggcttctgggggctggggcctgcacacagctggaggtttcagggaagggttaggccagatccccagtccgacacttgtacctttgaagggggcagagcgtggcagttaaggatcaggcttcatatcttggctgtgacacttattagctgagtggccctgggtaagtcacttctctgtgcctcagtttccccaccagcagatggtaacgatgctttgcctctcagggtggtagtgagcagtgagcaaatgcatgagaaacgtgccgggcagcagggctcggtgcatcctggccatcttataccatcattccaggcagttccgggcctcgtagcctctgactccatgcgtcctccttcagccacagtcccaggcctcctgctccccatgggggtggcccaagaccctagggctcaatgatgtaatgacaaaagtgtttagcaaccggcagagagtgggcgcagggtgcagggcgttggccctgactttagcatttaccagtttccatggtgtaaataaataaccctgccctgtccaatttcaagctgctgtggatgtggagttgggaacagatgcccagtggcacaccagggtatgatgtctccaccgcacagatacaagaggcgtggataaccccaaaagcagaaatgatagtcaaacatgttaacataatcaggaagtggtaagtgttgcatattacctttgctcttttgacatactttgtgagcatatgcaatttaatttttaatgatggctatgcttgacaactgacccatgacattactgaaatgtggacagctggctctcccaagcaagtccaagttggccccagccccctgcggtgctgttctgtgccgtctcgcccagggcaccaggacctgctctgaaaactctgtggggcctggcttcagcccaccttgttttcatcccacgtgtcactctttggaacaccatgtttaagcaggggccatctctgggtttctttgtgtagcccgtgttcaatcctaaggaccctcactcctggccccttgtctgctagtcaccttccacccaaggttaaaaagcacagggtttctagccaggtgtggtggcgtgcgcctatagtcccagctactcaggaagctgaggcaggagaattgcttgaacccaggaggcagaggttgcagtgagccaagatcatgccactgcaccccagcctgggtgacagagcgagactctgtctcaaaaaaaaaaaaaaagcacacagcgtttggattcaggcacacctggctcccattctggacctgacctttcacagctgtgtgaccatcagcaagtaagttaatcccaaagagcctcatttgtctcatctgtatgatagggataattcactgacaggtcacctcaaaaaagtttccttgagtctcttggtcgtccctccctcccacccgtctccccaactccattcccaggcagccactcatctgctttctgtcactatagattggtttgcattttgtagaattttttttttttgagacagagtcttgctctgttgcccaggctggagtgcagtggcacgatctcagctcaccgcaacctccacctcccaggttcaagcgattctcctgcctcagcctcccaagtagctgggattacaggcatgtgccaccacgcccggctaattttttttttttttttgtatttttagtagagacggggtttcaccatgttggttaggctggtcttgaactcctgacctcgtgatctgcccaccttggcctcccaaagtgctgggattacaggtgtgagccaccatgccaggtggacttttggttttgtctgcagcctggctagtttcagtctaggctttccgccttccctttgagcctgtgagagcttccccacagcccttcagcgagtgcctttctgggttggttctctttgcactgggaatcctgactggtgcaagggagccgctgtgttcccatttcccagctgaggaaacacaacagagagaggttaggtgtgttgcccaaggtcacacagttggaagtggcagaggcaggatcaaaccaagttcacgtctccttcagggctttaggactatgtatcatagtaaaatgccctctcacacaccattctgaccacctggaagtgggcagataagggactggctcagggtcacacagtgagacaggaagctgggcctgtgcccccaccacacagtgcctcctgccctcaaggctgagtagagcgtggagcttcacgcatgttgagagggaaatggaaggagttgaatgcattcattgatttgttgagcaatctcgtacttactgacagctgaatatgggtcaggcactgtcccaggcaccagcaaggcagcagcaaaacaacagtgaaaaagagagtcgacatggcacacactgtcatatcgggtgacaagcgccacagaggacaaagtggggtgagggatggggagtgaggggagaagtggctgcttcagccaggtgggaccgggaagtcctctgcaggtgaaggctgagagaagtgaggagcaagggggacctgaagacagaggcagaggggatggcaagacaaaggccctgcgtgggaatgagcccggcaggtttgagaagcataaaggccagtgtggctggaaggagggagccaggcaggggtgcaagatgaggatgtggggtgggtgggggcagctaagcagggccttgggtttctttgaggctggtgggaagcttttgggaggctttaaaggctgcagggcagtgggggtctgatgaatgcatgaggtggttcactctgcggtggagcgatgacatgagccacaaggagacagagggggaggcagagacactgctgaggggcctgaggggttgtggtggtgtccgggcagggacactggggtggaggatgcagtggtgacatgtgggctccaggaccactgactatcgtgcaggatctggtgctggggggcagtgagttctcagggagggaaactcgtgtcagggatgagaagacaggggctggggatgccggggactgtgggcccagagcaaaggggagctgtgacacccagagaaagggtggcctttggcctctccagggcaggggagcccagggcagttgggcagagctgggctggggctgagccagttgggctgacaagaaggcttgggcgggacctgacaaggaggacttgcttcagggtgtcaacctgtaccaggctcaggctgcaaggccaggtagtgtcaccgtaaccctcacctggttgacacagggtctggacccaaggatttccttccaaccctgtaatatcattatgtactttaaacagctactgggctgcttgacagtttctagggctgaggcagggcccaaatggtggagaagaggcagctagaggccgggaactcagaaggggaatctcagcaaaaaacaccccgaaggagctgagtcctgcgggagctccctctacgtgaactgacgggtgttgtgggagcaggtccagccacacaaaggaagttccagtagagctggctcggcagttgacagtttaaatcctggcttgcctcggtgctgctggcttcggtccgcagctccctctagccagcccacacccagctggggagccactcagggctggacaggggtcagggaaagggcattcatgtcaagtgccccggaccaagaggccggagaaaaccttcagttccaggttgcctagggcaaaggtggtgatctttggcagcacaaagtgccctgggtttggggctgtcctttggcctccagtttcagtgctagcctgggagtgtccagagagatgaagtatgagatgacttgtccctcccaccacagtgcccaagtgggaggaggcacgctgacccatgcagccacacacacaacccacaggcctcatctctgactctcccaggcaagcaaaggagcagactgcagcagccctgagatgtggctgttgcctcggaaggaatgttgccttggaaggaagaggaagggatcccggcggaaggaagaggaagggatcctggcggcagagcccacatgtgacaccagtaacccccaacccctaaatcagctacctccatcctgattggtcaatgcctgagccatgctggttggtaaatattttgagcatcacctcattctgcggaaccaggggactcatttgtgaaaactacctggaactcctgtctatcaattttagcttagcctttctttcacagtgtgcaaagggcgttcattctcagcaatgcagaaggcaacctccagcttgtctctcctgaaattgcagcctggtccttggaggctgggggaggggacacccctgtttccaagtgctcccgggaggccaggctgtcagagctgtactaaaatgtaaggtttgctcttgagaaggctcaaagatcccacttctcatgggaagcgtggagtccctgcaggggccccaactctcatccaggcctgcgaggtcagaggccctctcactggtccccagattcgagctcccgccgtgcttgctgggactgccagatgtccctcctgactccagggaaaggaagttccaggctcctctcccctctgacccccataccgtgggtcctgccagttgctagttgctcttctatgtcttcagacgctccccatcttaagattcactttctgcagaccccaccacctcctcaaccattttatctagctgtgcctctggatacgggtgtgggaccccactgacaggccaggccagggccagtgtgcatcaccatccccgtgcagtgccctcctttaaggcccactttggtttctgctgccctcatttcctcttccccttctgccaggacctgagctctttctccttcccagcatcatcgaacttattccatccacctcctcaactcccattccctctgcaagtctcagtgataagagtagccaatgttgactgagtgagtccttcatcgtccgcatcagtgattcactgaatccacacagtaacctacaaggcaggaatcattaccctctttttcagatgagcaaactgaatcttccgaaggttcagactgcacattgcagagctggactgtgacccacactaagtttggacctgccccaccatgaggctagagccatctcttcacagttctcactcggggggctgggctggggccaatggaagcctgagagaggccgtctcttcctggtccccctccccactgaaagtgcttccttgacttgaagtcgcccgctgtccagatgctcctctctcccctgcccacaggctcagtcctcaaccctcttgtccctcggccacagcgctcacccccacacctccaatcatcatctctgggtggagactcatttcctctcctgcccactcagtttcccagctggctggtggacatctgcccccagagatgcttggacaaccccaaccgaatgcgttccacatccaaactcctgattgccaccctcccaaaccccctccctctctcgagagccccatccttgcgcctcctcgttacacgggctccacctgccaacaccagctctgccattctcctctccctcagcctccacgagccatcatcgggtccttcccacttcctgcttccaataccactattctggttctccttcccaagtgctgagcacagggacctggagagcacatgctgagactgttagaatgaactgccatttgcctcaaccgttcactcatccaacagttatttattgaacgccatggaccaggtaccgtgcccagcagctgggatgcagcactgaacacgagacaagcccctgccctggaggggcttacatcccggcagggtaaacagccagtaacttcagaaaccaaacatccagtacgtcagagtgccatgggaaaggtacgctgagcaagggcgggcagtgccagggctggggtgccactgtacagggtgatggggaggccctcctccctggagagggcggcatgatcctagtgggccgaggtcaaccgccagggtcaaacggaacacaacccactctcaggaagacatccctaacacaaatccagggactttgtttcttaaccttaaaattggaaacacttcttgctaccagggatggggggtggggctcagcgtttggggaaccggagtgggagtcttttgctgaacagacttttgttttcttaagttttgaactacatgaatgtatttccttttttgaaaggaaaattgaaataggaaaaaattttaagtcttttggaaagaattaatcattttcatggaactgcttccctataggggcctgttttcgtatctgccaacttccactgaaacacgcagatggagaaccctccagtgctcccgagaagggagacagtcttaacccagaggacagcatccaccagcctgcaagcacggaccccgtgctggtgtgtgagtgcagcacacactgggctaaccatcaccacagtgagactggcaccctctggggtagggtagactcaggaaggtgaaaatcaggatgtctgccaggagctgacaaatccctctgggactctcatacttcagaggctctccagtttggctattgctaaacttggactagcccctactaccgatcttaatacccatgtaccaatcattgctgcatcctatttggaaagcaatggacagacagccacgctgaaagcccttactagagactggtccacaagatcagatttagctgcccctggtttgagccttgctcccctggtgtcttttctggcgaagctgggcccagagagcgttttactaagtgggctccatggtagtggaagtggtggggacagaaggctggctctatatgtggcagaggcctgaataaacagggatttgagagggctcaagatatcctgacttaatcctcaatgtggcaggcacagggccatggccaggcctagaggaaggtgggctgtttggggtatggcccagcagggcacgatgtgatcaggtagggcgtagggaaatgggttactgtcctctaaatattccatatatcacaaagttactgactgcggtctccacaaattcaggctgccagtccgatgcactatatcccaacaatctgagcactctgtcaaagatgctcacagagacaacaggagcagacagagccttgtttctctcttaatcttcagagcctagaactgagcttggccctcaccaggcacttagaaattgcataatgaaagaatttcagatttttattagtggcagtgagcactgaaaacccagtatttggccaggtccagtggctcacacctgtaatcccaacatgtttgggaggccaaggcgggaggatggcttgaggtaaggagttagagaccagcctgtgcaacatagtgagaccttattctactaaaaaaataaaactagccaggagtggtggttgcgtgcctgtggttccagctacctaggaggctgaggtgagaggatcacttgaccccggggcttcgaggctgcagtgagccatgatcacaccactgcactccagcctgagccacagtgtgagacccccatctcacaaaaaaaggaaagcctagtattctatacaaccttaacctattttttttttttttttttttgagacggagtcttgctgtgttgcccaggctggagtgtagtggtgcgatcttggctcactgcaagctctgcctcccgggttcatgccattctcctgccgcagcctcctgagtagctgggactacaggtgtccactaccacggctggccaattttttgtatttttagtagagatgggttttcactgtgttagctaggatggtctcgatctcctgacctcgtgatctgcccgcctcggcctcccaaagtgctgggattacaggcgtgagccaccgcacctggccaaccttaacctatttttaaaaaagatgtttatggctttgctgatagcaggctggaaagctagctgaatttgcaggcaacctcaagtagttaatgaaaaattattgtggcttgtccaaagggattgagttttccaaataaaaaagtgggcttcagttttatgtcattgtaagaggccatgtgagggatgtttggatgctcgctttgaatctgtaggaccactcaatgattttttaaaaccattggtttctggcaggcaaaacattcaaaatctaggctatcccaggaaatctagcataagggctgtcctgcagtaatgcattaaaccacgtaacaaacgaactcaagaagagggatgtggctctggatttgtgaccctcaacataacatttaccaccttgggcttcggcttcaacatcagttaaatggagggacacagacgactctttggctcttatactctatgacatgatcactggccaccttagaaaatcaagcctatttagaccacggtttgtgagaagtcagactctctgaggctcagtttccttatctataaaaaagaagatgataacattgggagaagccatcttaagcagcgaggaaagaaaaggacagtggagtcaagtgaacagtctcagatctcagccccgtgtaatctaagggaaggttactggagctgggtctactttcgtcatctgcaaaatggggataagaatgcctgttgtaaggacagttgaatgatcttgctcatgccaacttacagaaggtacgaaataaacgccgatctcctttattctgatctcacattcagcaaatgtgagagaaatgtgaatgtactgaaatgtctgccagaaaaaagaaaatccaacccctcaaaagaatgacatcaggggttttgatatctattcacctacacttccctcttccacaggaagcggcccaccttctgacccacactgcccatctctgtgcttatcatggagctttcaagagtgaggatcggaggctgtattgagcagtgggcacaaaccacagggagcgctgttcaaaaatggaaaacaaggtggccctgacaccgggtgctgctgggcaccctctcagacctgccctgcaacagcatcaggaggctgagggtccccagccagaaggcccaagaggggcccaggctggaaactttactgcgaagcagccctcatcttaaggtggctcaacaccacacctgagatctagcccatgcgacagtatggaagcaggaggccctactccaccacagaaagaacatttatgggcgcctaagccctgggagaatggcacctgagggaacagagcgtgcccacaagcagaccttggggagggagaagaggcagccctgctcctagtcgcagccagcgtgcgtcatgtccaggccccacaagggtgaccctggctcaggttctcatgctccagaagctggcccaggtggcagtgggttccctatggaggcagctcatcattcacaacacagcaacaaaccttctgctctcatgaggagaatgtattttaaacttgggaagagtcataattctgggatgtttcacatgttgtcagctttaaccttctacagacacaggccctctcctctgtgaggagggacctctggcatgtgtgggtgtgtggtgggtccctctccctattagcagaaatgtgttgggcatgagccaggtttatgatttggattgtgtcctgcacataacacctgtgagaatacaactgggactaggacaatgcgggaagcatattcttcatgaggcggtaaccaaaaggcttggctataccaaaggattctggtggccgggcacggtggctcacacctgtaatgccagcactttgggaggccaaggcgggtagatcacttgaggtccaggagttcgagcccagcctggccaacatggtgaaaccctgtctctactaaacatacaacaattagctgggcatggtggtgggtgcctgtaatcccagctactggggaggctgagacaggagaaatgcttgaacccgggaagcagaggttgcagtgagccgagattgcaccacagcactccagcctgggtgacagagcaagactccacctcaaaaaaaaaaaaccacaaaaaaacacaaaaggattctgggtgtaacaatctcagtagagccagcgggtgactctggttctcctaaaattctgcccttacttgccactcaccacacccccagatctgaagggccagcccttttctacctatgacacctcaccagcaagtaaagggcacaggacctcagaagtctgtggtgctaaggatgaagactctactcagagaaggtgctcagccctagtgaggaggttctgggaagcaggtgggcctgctcaatgcagtccctaacccttgggagcatccatgtgagaggtaaaggtgcaaatgacttgggcatgttgactccctactgaggaaggcagggcccctcacatctgcagtggccgtatgcatcagagaacggcatgactgcacatgtgagaactgggtgcacccgagcagtgtcaataggaatcccttccctattccatgccaaacagtcttccccagacacaaagtttccaggtcctgaggcttgactcttctaaggctcaaaatgggttctgtttccagacgtgcttgccttgcttgtctttgcttgtcttaaggactctatttcaggccaatacttgatcctcagacaaactgggacaggttgggaactttgatgttgagatcgccaatgttgatgttccgaggaatctctggcaggttgatgtttttcacagcagacacagcccgcgcaggggctgctgaaaggccaccctaagaagaaatgagaggcgagtatgagacaaattctcactgttatctgcttaatgctaaaaaaaaaaaaaaaaaaaaagcaaaaacaaaaacaaacaagcaggatgggtgtggtggctcacgcctgtaatcccagcactttgggaggccgaggtgggtggatcacctgaggtcaggagttcgagataggcctggccaacatggtgaaaccccatctctaccaaaaatacaaaaattggccaggagtggtggcgggcccctgtagtcccagctactagggaggctgaggcaggaaaatcgcttgaactcagaaggcggaggttgcggtgagctgagatcacgccactgcactccaacctgggcaacagagtgagactctgtctcaaacaaacaaacaaacaaaataacaggtgaaggatgcctagaaaaattccaaactgagcacacacaactgaagttttaactttccccccttattcctcaaaagtagccaacaaaacaatcttgaggttagatggggtttggcacagggatccaaagcctgcagtcctactagactaccagctcctcagaggcggagtgtggcctatacagtttcacagccccagcctctcacagtacctggcacatggtgggtacccaataaatgctgaaataatctaaggtgatttgtcaggggcacttttctggttacaaaacaaaacaaaaccctttcctcaagagaccaaagactcttattgaaacgtgcaaagtcaccgggaagttcttaaaaggaaaaggacagtcacagctctagggcaactgcttgccaactaataatgtgagatgaaaagagctggctttggaagtgtcatgtggcaacaagctgggagaaggtggggggtatcacagataaagaagagctggtgacaaaacgcaaagagtatgcacatctacagtgaacccccacctggcaggctcacccccacgtggagggaacggcaaaagtggatgaaaactctctcacaatcatttttcccctattgccttctttccggataccaactctgcttctgccctcacccagcaagtctccatttcttctcatttccaacccccttgcctctgactcacttactattcctggaatcttcccagcctacatttctaaaagaactatagctgccaccaatagctgtggtctggaaaagcttcttccacaggactgccagtcctcacagaaagaagaattcctggtttcgcaagatcaagttccgtatacaaggcaaagaagctctttaagacactcagataattaaagaggtaatttgttctgctatttctgcatgtgaaagtatacgtctgtaacctctgtgctctgggaaggctgaggaaggggacggcgagacctcagagggataggacagaatttatgtgaacatctctatcaagcccagcaccatgtgggggtggactggggtatgttattttcaagcctagcccaaactctactgtagttttttataaagctaactggaaataaggaaattggcaactctgaggtctgaaagacaccacgagaaatggctgctgggagatcagactcttagagcacacaaactaggaaaccacactggactagggaagagggttctgggtccctccagggaacgagtggctttcaaaggaggaattacaaaccacaaacatgggccataacccccaagccagaagctgtttgccttcctctgccatctggcttttctatttgctcttctaccctgaaaatctgagatttcaaacttgttacctgtttaattttcagggctggctgaccttcaaatccatgagtttcaatggactcaaggaagaaagaagatgagtatcatttcccgaggtttcacagcaacacaaaccaacacatgtacacactcctgcctctgcccaggttttctctacccagccagggctagagcacagctgcttactcacctcggatttctccagcctgttttgagcctcaatctgagccacgatttcattcatgtttgtttccaacaccatcccacccatcaccacctcctggaggatgtagtgcacctaaaagggaagcaaaaatcaggagtcagaatactctgtggtggtcagagtgtaacccacgaggtttccttttcctgcagcagcagagtggtcagatatgacctgtcctgactcacaactcagacactcaaacccccctgcccagtgacacaacgaggggtctctcccaggtcttggcacatggcaacacgaatctctcccctcagcagcgaggtggtagctatgagcacaggcttcaaagtctgacagctcttgtttaaattctggctctgctacttgctagctgggtggccctgggcaaatgacctttaaagtgcttcagcctccttccaggattgcagtgaggactggatgagataaatgtgtgtaaagcacctagcctggtgcccaggacacactgggttctaagtaaggaatggtggctttcattattaatattaccatcatcaacactgactgtcattaagtaggtccagctatgacagaataatccctgtccaagcaactgaaatgaatgtcttccaccttctataaggcagatcctccagcctgtgctccactgaagggacgtgatcagagcaagatagagcccaattcctttgcacctctcctcacctcatttcttactgcttagattagaaagcagattcagcataaacacctttctaagcataagggtcacatttgggcttaggttccatctagctagcagtcatctaaacaaagctgaatctcagtgtacctaactgctgtgatgggacggaggtgactcaactactgtacccctttgtggtaggaaagctgtcacagaaagccctgggtgggtcaaagcagagatgcccactgtggttcataaggaatggtactccatatttcaaaccaaatcacatcaaatggccctcaaggtgctttcggtcaagttgggaagacagcaagtacaaccttctattgttaactaagtgccaaatgactgggatagtcctggggaagtcagagaagaaagggtacagtggctagagagatcagagagcttcacagagacagtgggaggatggaagctgggctctgacattagagaggtaggggaaagaatttcaggtagaagatgttggaaggagcaattcagctggtgtatgggcaggtatggggagctcctgggtctggctgggatggcaactttctttatgcaggagagaggctaagacaaggctgagaaggtaatttgggtctggagcagggcttctcagcctaggtactagtgacatctgggaccagataatcctctgctgtggggctgtcctgtcactgtggcctgttctctagcatccctggtctctactcctccagcttgacaatcaaaaatgtctccagaattgtcatatgtgttccagggggcaaattcaccccagctgagaaccactggtccagagtctagagtcaaccaccagtttactctgtcagcaatgcagagtcaagaagaaagatgtgtctgcatatctgggcactgtgcacttctgacatctgaagttctctggcattggctccctgtattttgccctcagtaagtgcagggaacttctgatcttgaggacagagtataataaatcaaatgtattcccttgcgtgtgtgcccacattgagctttattaaccactgttctgtctacacacacgcacacacacactctcacgaggtgttcttacattttatacaatatgaattattcattagctatatgcaaatgaagatttaatggtaaaagtctcatatttagataatttacaaaatgttaaacaagactggttttaaaattattccctgggggaattccactgtttatacttccccatcaagaaataggcctctgaaaacagtatggtggttcctcaaaaagattaaaaacagaattaccatatggcccagcaattccacttttggatatacactcaaaagaactgaaagtaaagacttgaagagaatgtgtacacccatgttcatagcagtattattcacaacagccaaaaggtggaagcagcccaagtgtccatgaacagacgactggatcaacaaaatgtgccatagaaatacaacagaatattattcagccttaaaaaggaaaagaattctttttttttttttcatctgaattgagatgctgtaaaagggaagggaattctgagacacaatgtaacacggatgaaccttgaagatactataagtgaaacaacccacacacaaaaggatgaggactgtgtgattccactcctgtgaggtacccagagtagtcaaattcagagacagaaactggaacgggggctgccatgaggcagggggaagaggacagtggtggctattgtttaatgtgtacagaggtgctgttttgcaagatgaagagctctggagacggatggtggtggcgactgcacaacaatgtggatatacttaatgccacagaactgtaagcttaaaaatggtgaagacaggaaactatatgttacatattttaccacaatttaacaaaaaaggagagaaatagtcctctatacctgcactttcagtatttattccttttatttagccaatccctgtgtgggtagaaagtagtacttgttgagtatctattatgaaccaagtactttatgtaacttaccttaattttacaacattcatctaaggtaggtaatataatcttcactttattattattattactattattatttgaggctgagtctcactctgtcacccaggctggagtacagtggtgtgaacttggctcactgcaacctccgcctcctgggttcaagcgattctcccaactcagcctcctgagtagctgggattacaggcacccgccaccatgcccagctaatttttatatttttagtagagtcggggtttcctcatgttggccaggctggtctggaactcctgacctcagatgatccccctgccttggcctcccaaagtgctgagattacaggcgtgagccaccacgcctggcctgacttcactttatatatgaagaaattgatacattttatatatgaggaaaaggcaataaaatgatcccaatgtcatgtatattagcagcagaatggtgctgattccggagctcatgttctaccctttatatcatacttcctcagaatcccaaactatgtcttccactctattcatccctgacccctagtccacatgaaatcatttaagacttgtctttggtgtgtcaatatcttgtattaattcttccatgctttatctccaaggcctagaacaacgctcagagtaggcatgctaaatgaatgaaaggctttccatatatctaagtagcatattccttgggctttagggacttcgaagatagacaacagtgtggtggtgggggctttctggagaaggtatagtaaaaggcctaacacatgatgtcgtggagactagtggctggttaacagaaaaagtcagttaaaacttcttatttaacactgcatcataaagtcagcattttcaaatgctgttcaaaatatgttccaaatgcaaaaagaagaaataaaaatgcaaactccatttttgttataactacaggatatccaaaattccaaacccccaaacaggtgaaaaagctgtcaaaagcagggagctcaggcagggactcctttgcttcacagaagaaaaagaagaaaggatgctacagggagaggacagggaagctggtgatctcagaaagatctgcaaaaatatgtacttcctgtgggtaaaggacacactccagcaccaaattaattccttgtttttggaaggcaggaacttccttggacctgaagttgaggctaaatgagaaatcacgcaagctacatttgcctcacagaggtggtgtctgtggtagtagagaagacatcctttgcattgtggagatgctaagagacgccttgcctatctcgattggctggctagagactaagggtaaacggactcacccagaaccctaaatcaagggaacaactgtagctagcccagaacagagttttggtagctcctccaacaaacatcctgcaaaacagctggtccctgaaaaacttgcctatttaaagataagtatacaaaaaatctaaacaggatctatataaatatacaacgagaaaaaattaggaaagaaataggaaaaccaaatggcagactaagaccacagactggaaaagggcctccatggactagatacaatggtaataaaatattttacacaaagaaaaaaagaaaacttgataaaatagttgtctctatgaaatgagagctcaaagcagaaatacaagaactttagcagaggtagggagacgagaagagaagacaagctgcatactggcagaactgaggaaagaagtgaaaggaaaaatactgttacagaaatgaaggtgaaactggaagaagcaaagggagaagaaactgctaaaaacacactaggaacaaaaggagagaaatggaaaaaaaaaatgaaaccaaaaagggctaaaagaaatagagaagaaacagttacaaaagacagcaaaggagatgtaatatttgcataaaagaaaactttaacatgaatgggaaaaatatgtaaagatatgttcataaagatagaatctaaggtgtttctgaactataagaggattggggtctacacactgaaaggtcacactgtatcccaggggaaacaaattcagaataggcagtaccaagatacacctttaggtaaggtttctgggttcctgc

SEQ ID NO: 48 - DNA, 536125 bp, Homo sapiens
tggaggttgaagtgagccgagattgcgccattgcactccagcctggacaaaaagagcaaaactctgtctcacacacacacacacacacacacacaaaataccagtacctatcaaacttgagaaataacaaagatttgtatcagatattaggatgtattacaaagacataatagtttcaaattatatataggggatagaaataggtaagagtattaaaacagactaaagaatttaagaaacagacttatatgagaaatgattaaaatgtcatttcaaattagtggtgaaagatgggctgttcataaacgcgatgtagtgataagagtatccattggtaaaaatatcaagttggatctctatctcaaatgctcacaaaatactccagatggattaaaagcctaaatatttaaaagaagactatgaaagtaaattaaaaaaatatgagaatgtttatgactttatagaaataaaagcctgctttaaaacaaagttctaaaatcataaaggtaaaagataaaacttgactacattataaagaaaaattttcagtataaaagggacatcaataaagttaaatcatgaaagacactgaactgtctaacccaggggccatggcacaacagcaaatccaaagcagatccatagcctaagtaaggctgagttagcaagcgagtaccatatggtgctaaccccaagtgagagcaaaccacacattcatcagttgtacttcagcacatatcagtggaaggtgctcaagggtcacaacagaccagccactgttacagagtcccagaggatccaaggaggaagacaaggaccagcacccctccttccttatcatgagttaatataagccttcccctaaacccagaagccaatcttgtaaggaggaagagggagagactacagaattcctaggaagactcaaaggcaaggaaaactcagtcatagaaaataagctacattttaaaaatcaacaatagacaaatgatctgtagtagagtctgactccatcttttgatgtttgctgacaagttttgagcctctattctcccacttcctcttctgtccacatctgagtaagctgagaagaaatccaatgctcccttctttggtgccagtgggattttcaaaccctgcaagccccatgctgcaacccctggcccaccttctgaccacaataaaaacccagtctcttccttgttctctcaagttgccttgctctctgcagaaagcctcactgagtaataaaccttttcgtatcagaaaaattccaattaaaacaataagatgccattttcatctttcacagtgtgaaaaaataaaaatatttgaaaataggtgaagatgagactaatttttatacactggtagaagaataatttagtcaacatctatttaaattgtttaaatgagcatgccctttaattcagcaattccacttgacattaacatcttccttagagaaaacacttgcatgtatgcaaaatacatgtgcagatgttcactgcagtcttgtttgtaatatcaagagattggaaaatatctaaatactagttaagagtggtagcaagttatggtttattgacaccatgggataatataagtgagttaaaaagaatgaattataggtactgacaaagaacgatctgagacatagtagagacatgaataagcacgttgcagcatagaaaaattttttagaaggaaacacagcaaactataactcgttagtttagatgagtaggaggtaaccaagggaaatactcacttgatcttgtctaaatttatcatatgactattacaatatgcatttatgtattatttgtgcagttaaaatacattttaaaaaatgtttaaataatggttggattcccaaatcagctcacgagactattgttgaagctgcaaagccgctgtccatttgctatgaaaggtagaagacaatgccattgaagtgcaagtaatacaacaagattggaaatattttatttttataactttattttggaataacttaaaacctaggtaaaagtttgaagaatactaccaagaatcccaatcaagtcggaaatcaccattcaagttttgttaatttctccagttatgtcatttatagcaaaagggtccaatccaagactaagagttgcacctagttgtcatgactgtctagtctccttaaatccagaacatacatccttccttgacttttatgacactgaaaatttttaatagagggcagatattttatagaatgtcactcaatttggttttgtttattgcctcatgattagaccttgattctgcctttttggcaggaatattgcagaggtgatactgggttctcactcactgcatcctgtcaggtggcgcatgatgttgatttgttcccttgctggtggtggtaactgatcacttgattaagatggtgtctgccatgtttctctagttacagttttctttatgattagcaaatgtttttttgtgaagatactttgactatggaaatgtcctcttcctctgtcccactttacctcactagttttagcatccactggtatttgttgcccaagtcgttatgataatggttgctaaatggtaatttcaaaattccatctacatttatttatttgttgacattctattgtaagaaagagtttttgctttctccttttatttatattaatgtggactagtgtgtacttattaagttactgttatgacttttgatgctttttcctttttcttttcattattattattatttttttttttgggtagagacagggtcttgttatgttacccaggctggtctcgaatttttggtctcaagcaatcctcccaccttggcctcccaaagggctgggattacaggcatgagccactgcacttggccttgatgctcaaattatacctgatttgtcctaagctagcttgtccttaagcttgtcctaagctagcatgtccttaagctagctgctgtttccttttgacatgtccctattctttgaatactttattttctgacacaaaaatgttccttaaaatcagacatttgttcatagagctccagttccttttagcagagaatagtaattggaaatcaatatccaggcactagttgtgctcattgctccagggtgtgaggggcttgctccctgtcctcttggtgtgcagaattaggaaatatatatgtaccacacaggcacgtgtgcacacacacacctttatatcacatatgtatgtaaactatgtagcgatacccatatatatttgtatacattatttatacacactttatatatatgtaaaaatttatacttatacttcctattctaatctaataccacagggtttattctagctttcccttttaatttttcctttctttgttctccatcagggagaaacctggctcccatagtatcaatgtacttgttaattgctcagtaccctgtaggtagccaacctcctgaccccaccgggctgccttctgccctgctccagtgccaacatcacacgccatcactgaccactgaagggttgaccctgccacttccctccagtgctgtctcctgtgggctgcccttctcaccctactccaatgcagtctttgtatggggatgccatcaccaacctttttgagtgtggctgacttttggaatgaatgaatgaatgaaaggaaagaaaggaggaaggaagggaggagaggaaagggcagcagggaacagagggagggagggggtgaggaagaaacagaaaggaagggaagaaggaagaaaggaagtcgaatcagtatttcaaatattgaatgcaagtatctgaagcttgagttattgtaattcaaaaataagaaggtaaatggatccctttgaagaaattctgctagagaaaaattctgaaaaggaatttgtattttaaagggtcagtatgcatatttgtatttttaatcaacaagttttttagcctagagttggttggctgttttttccaatttttatatggaactaaaattaggagaaaaattatggcggtggggaaattttcctgagattaaattagacaggatttggaagaataaagtcagttgtttatggccagagtatagataaatatggggaaagtgcctggagaggaattaactatgcttatgaaagccagaggcgcaggagagcacactctccagagaactgttggaggtcttgagttaatgaatgtttatcataactactaggagctggaataagcccatagtagcttaatttttctgcctggatgaggacaaagcctgagctgaaaagaagtgaggaagtaaggtctgcatgttgagtttgtaggtacatcttacccaccttggtttcgtttgatgcattattaacaaattatttttgcttgtacttcactgaaggtggacttcaatcaacatcgtcaaaagttgtctttaaagtcttccaacaaaaagtaacacatctcctcaaattgatggagattttgaatggctattgggttaataaattctagtacaatgtgtgagttttgggaagttgtatttgatagatttgctgtacattgctctcccaccccctccctgctttttgaaaacaattaacactttgcaaaaccatagttcatactgttataaatgggtcttacctctgtccatatgtaatcttggaaaaaatcattagtgcatgacatcatgacataagagagcatctatgtacaaacatatacaattttattgatatctctacagactacaagaattttgttaagtatagtcacaattgctgagtgcaacagaaaaatagtaatttgtcattttctgaaaagatgcaaaaattctgaagatgaaagaaagatacatcaatgatgtcatctgtttcttatttcctagaataaaacatcacataattaagtactaaaaattataggttattagagattctgttcctgtgtacaattgtccaaaaccaccatctagtttattttctggctttgcagtcaagaagggtgggccaacagcagagggaaagcagtatgaaaggcaataactctgagtttcttctcattatgtgttactgcctttgataggctggactctccttttttgaaggtgtaagcaccctttcagggcactggatgtcatataggaagttacaggtattcttttcctttaaacacatgtccaaagactaagaaaataaatccaagtggccctgggagcttttgattgagataacaatcaaaaaggaagatttgttcttcctttttgctaagaccaagtccagtgaaatatacctacagcagaacaggtacctggtacccatgtctcctccagaagaagaatgaataataaatttggacctaatttagcaaatgattgttttgagaatttccactgtctaaatatgaagaattagttttccacttagctttatatgctcttgaatttactgtgctacttctggtatcttgtgatgtcacatgtgtaagacaattgaaaaaaaacctagacctttgaattggaataattgatggacaagtcacataggagaatatcacaaagatgattattaagagttgatggagcactgcctggtcagaaattctcaaatgcttttgttctgtgagacatacagaataaataccattactatatcttacatcttgccttccctgaccactcagaactggggctggagcaccagccaaggcagacaaacaaggtttccttagttggccataaagcagtgataatcaactttggctggacattagaaccgccttggaggctttcgcaaatattggtgtctggttcccactccaaatgattttaatataattgggaatttaaaaatttcctgaggtgattcttatgtacagtcaaggttgagaatcactcctctagataaatgtgtaaatcaaagcatccatctgtgcatctgattccttaaagcctctttcacttcactgtggctcccatgtccttcctcaccacgatcttcttgcaccaaattggtacttcctcctccttttctaagacagaccttacctattctacatttcatgctttcagggctatgttgtctgcaaatacacacactaaacttgttatgttgacaaccatgttccctggaatggtgcatactagaggtactgctcaaaccaagtacaccacaagtatttctggcacccaggacagtgtgcatgtgaaatagtacctagccaaaaatggagttgcatgacagaggacagaggtgaagaagctgtgaaagccaccacgtttctcctgacacagataccaagacctgatatgaatgttttgacttcttttgcattgccctgtgtgagccaacatggtcaagttacaattcttttttctcatagcagcaggttgtaatcacacagatatactcccagtttgacccaatgatcctaagccaaggagaggatttttagcttacttttctagattggcttcatttttcccttctgcttgaatataagaatctattttaatcttcttcaaccaatgttaggcctaatctgattcttttttctctcaaagtcatggtgatcccttcatgtagataaagtatagatgatgcctttaaaactggtacatgggtcacataaaaagggactccaacagtaaaccttttccttcagatccctagaaactttgagggaaaggagttggattttgatttatttatttgagaatcactttcaaaagatctgagaaaattgtctttgtgactgaatcactggaaaacatctcattcagttctgtcactgtcctttcagagttccagttagacaatgatcttgacaatgattggggccctaaagtctggggctcagtgaagtgtaagaagcaaagtcagtagtactgcttttgtaggtgattaaaacaaatgaggaatcaatcattcctccctccaaactccaagactaatggatgatttcaaggtagggactattgctcacgttattatcagggaaacaaatacctctagcttctcacagatgaataaatgaaaaggcccattttctactgtaacactaaaaaggccttatcttccaaggaaatcatagggagacaaggtcaacttgttgggactgtggtttgcaagccttatcttctgatgtcgctttagcagatagaatgtaattttgatggtaactaaggctcagagtcactttctgtatcattgtccaagttattaggagtatttttcttatgttccgaaatagaagaaagatagtaaagatgagactatgcaaaggattacatggatcaacagtacttattttccaaagatgaggataagatgatgatggtagtggtggcgatggtgtgtgtgtgtgtgcgtgcgtgctaaggtcagtgcaacagaacagaattgttcaaagagaaaaatcacatccacattagattcttcttattgctatcatctctttgaattataaaaataattttgatacagtaaaacctcattaatttggattccactaaccaggagtttgtgagatgaagttacccttacgttaaggaagggcttataaaagcaattttgaaagacacgttttaactacttcaaagagccttttcttttcaagcatttgagaagcacctgtttacttccaattggtgtgctaattataaacttttgatctattcactgaggccaaggttttaagcacttctacagtgaaatgctataatgtcctttttgatattttctctgtgtgccttaaaatattctgtagttgttatttttcactgattcctataagctttcttcaaaattgtatcttattgcatatgaaccacacatgtaattttgggtataataatttatcttgctaagacattgtatacttattgtacagttttatacaacaacatatattacatattcacacaatctacctctttgtatgatgtagaatagtggctgtgaactgggagaaattttggcaatgactggagacattttgattgtcattactaggaggttcttactggcatctagtagacagaggccagggatgttgctaacatcctacaatacacaggacagttccccacaacaaagactttcagctaatagtgctgcttttgagaaatctcgatgtagatcaagttaaaacaagttaaatcttattgaaggcttcagaaatactcatcaaatgtactgctactttggactgaatttcattatttctaaaataaactaatattttactcttttagttttttttaaaatacagaaacgataaagtatttgttctgaaaatcagaaaactaagtctttgaaacagatggtacaaagaatacattgcaatttggccactagtattttctagatcctactcttaagtttctttaatatttttaccatataattttataattctataaattatacagtcatgtaatgtctgtgtttccaagccagattctgttaccgtaaggctgttcacaggagtctgggagattcagagaggctttcttaacaagaggattcaaggactctgagaaatgctatcctagtgtacattatctaactctttcactcatctttgttctcctcaaaattactgagaacattgtaccactagaaacatttgctagaaagtacaacttctagcaaaaaattagactaaaaaggaaataaaaatacgattttttggctaataaaataacctgaaatccaggaaaattgtgaagtcttaagaaacacaaatgtaaatccaatgagaccttgataaacaaaaattcaataagccaaaaccataattaaaacttttcttgacgaaacaacatattacaggatgggtcctggaatgtgtatatatacattcctataacttttgacttccagaatcatgttaaatggtagtaggtgtctctatttggttttgactctggtgcttttctggtgagttatagataccttgtatcatgttaaggatattctttattccagctttaaaagagtctttaataagggacaagtgtttggcatctattgacataatctagtggcttatattatttgacctagggacaaaagcattgattttgtatcattaaactctttatgtatttctattgtctataatgatgactgagaccaagatagcaaacagatcactatattttataaagatttccagtggtaagtatcgaaccaatttccagtggtaagtatcaaaccgaaaggtattttctaaggaaagcccttgtaaatcagaaatgtcataaatcagaatccctttcccaaaacattaactgagattttactgaatcacactaaagagaatgaccagtttggtttgtgaatgtcaggctgcaagagcacctttcgattgcagaccctactgggtttgaacagtaatatactgtgtaactggcagacaaggatacaaatgaagcttttaaaatatatcactttagaagctgaaattggggtgtgtgaaatttccctttttgtgaagtcagttctcatagctaactctattgttcctatagattccccacacctactaccaactcccctatagagtacaagccaggctgaagaaaatgctttgaggtgacccaaccctgcatggtttgtgctaaaaacagcaacccattctgaaggtgatagaaatgaaactgattgtgttgggaataatttactatactggcaatatttgattttgacacaactgtgaatgatgtaaaacatggagagagaacattaatcagactcttgccataagaattcaataaggttctagtacaatgaaagttacagatgaggagaaaactctgggttcttgttttgttttgttttccgtttcagttgggtatggcaaatatatttgaaatgcactgacatcttcaaatgcagattttttaaattgttgagtgtggcccaattgatagaaatagtttaccatgaatctttttttcttctatcacaacatgcttttttttcttttccccttaagatgttaatttatcatgcaaagattttttttcattaagtgcattaatgcttttgtttgtacaggaattttcaaatcaagaggactccccgtagttactaaatataaatccttatcgaatgacatgccaagatgatagctccattccacatgggaaaaggcaaattcagccgtattttgggattttaaccagggctccagcctttgggttgcacagtgtctctgatacatctcttttatgaaaatttcagattgactgtaaatggaacattttgtagaagaaactggcttctagcagttgagtagtgatgctgggaataaatttggtttccctgaatatggtttctcaaagcagtcacagcttctttagaagtcagaattggtaccatttcttatccttgtatttcagcattaactgcaaagaaaaaatagccaccataagacgctaaaatactttaaaagtgctattcaaagcaaggccattttgagctaatcatgcaaatctatctcaaaacttataatcaaactgagtggcttcttttattttgtgaaataaagtgcatatgagaaagattttaaaaataaacaagctgtaaagactcagctgatagaaaatgatttttcatgactgagacaaaatggaggatgtggatcccagatgtatcagaaccaatggataatttctttaattatcccctaaggtaaagaagtatcgatacattaaagtatttttttaaaaaaccttttatctcccaagcactgggagaattataatacttagaagagatctaggttaccatgattctcatacaggattacttatgtggatctctgtttaagctttcttgtgcagatcctaaatgtttaaagttactcctgtatgaagatgtctgtatttacttaggcagtttacctcatgtgcatgtttggaaaatgcttctgcactggtcatcatgcctgcagttttctcttccagctctcctagcctctgtcctctttcatcaagtgcaatccgtgcacgggtcagctctcccatcacccctccagcagcgcctttcatcccttctatactacctggtccaggaatgtgttgcgcaaggctgcgggatgcttttcctgccgaagcttccccaactgagaatatatgcaatagcaatttaaaacattttgtcagtaattcaaacagtcaagcttgtcaccaagacaaagtactagtattacattctactgtcataattctcattaaaagagagtcttatttggtccagtcatatatgtatttggagatgttagcacttaagaaaaatgctaagaaagagactgtgagatatattgttatcataggccttttgtatgtgtgtgtgttccatacaatatggcataattgcatttcttgatgctgaattggaatattcaaatatgtgacttcatatttaacccatattaatgtttgttccaagcttaggcctgatcatttgcttaaatttctgcctgagtttttatttcagccttcttggttcaccttcatgtataagcctttgtaggccacaggttctctttctctctctttctgtctctctctctctctgtaaatactgaaaaatggggtatatgaatatatgaatgatggttatgtgtgttaaaaaattgatttataaaacaaacataacatttacccatataagttacatatgttaaaaatttgtggctgggcacggtggctcacgcctgtaatcccaacactttgggaggctgaagtgggcagatcacctgaggtcaggagttccagaccagcctggccaacatggtgaaaccctgtctctaccaaaagtacaaaattagccgggagtggtgacatgtgcctgtagtcccagctactcgggaggctgaggcacgagaatctcttgaaccagggaggtgaaggttgcagtgggctatgattgtgccactttactctaaagcctgggcagccaagtgagattctttttttatttttatttttatttttaaggaaaaaaaaacagctattttggcagaaatttagttagaattcccaaggatgtaatattggaatggattctagattttttttaaaataagagtggatggaatctaatttttttaaaataatagccttattgagatataattcacataacatttatccatttaaagtgcaaaattcacttgtttttagtgtattcacaaagttgtacgaccatcaccactatctgattgcagaacatacacataactccaaaaagaaactccatgctcattggcagtctctccctgttccttctgtgcctcagcccctggcaatcattaatctactttcagtctttctgaatttgcccattctagaccttttatataaatggaatcatacaatatgtggccttttttttgtctggcttctttcacttagcaagatgttttcaaggtttatccatgttgtaccatgtatcagtacgtcattccttttcatggccaaataatattctattgtatgaaggaacctagatgtttttgcataaaagttccagagaaagagaattttgatctataggaccaaatgatggtaggatattctggaaaatatattcataccttctctctgaaaattttccctagtatcttcctattatttaaaaatctaccagtgaggctgggtgtggtggctcatgcctgtaattccagcactttgggagggtgaggtgggcagatcacctgaggtcaggagtccaagaccaacctagccaacatagcaaaacctcgtctctactaaaaatgcaaaaattagccaggcatggtgggcgcctataatcccagctacttgggaggctgaggcaggagaatcgcttgaacccgggaggcagaggtttcagtgagcctagatcaggccactgcactccagcctgggcaacagagcaagactctgtctcaaataaataaataaataataaataaataaataaataaataaataaataaataaaaatctaccagtgagactttgataaacaataatactttttgattttgtttatcaaagtctcactggtagatttttaaagtaatttattctgtaggatttataaatcttacattctgaataaggaatctgttttccagcagtgattaaagtcaagcagattcaaaaatcttttttccagacttttttgaataccttcacattgccatgcaggtatgatctacttgcaaatgagatatttattagcttgctcattatttgtatgaattatatgtatcacttttgttaaacaatttcctaatatgaagtgaccactttccatgttggtaaatggaaatgatttttatggtacagaaggaaacaaatattcaaactttaagatagatgcaaaaaatacgtagtctagaatttgagatcacatattacattaagttacacacacaaatacacatacacagaaacgtcttctattttgcaatacatttctataatcaggaatttactcacagagctcttctctgtcaaatgtttgtccgcttccaccaaacagtcccttgagaaagcctctgttttgagcttctggtgtctctatgggagtaaacaaatctcctagcatgtcctgcatcaaattcacagaaaaaagcattagaacaactaaaaaatcaattaatatacaaaaaggtaacactgtgatatagtaggacacatcatgaaaaaacagtctgcttttcatatattttcatggtgatttttgctgtgctcacagttctccctctggcatttcttttgttcctccccttctatagtaacaaacattctaaaattttcctttatcctcttctcttcttccttccatcaaagcatgggaagctaatatagctaccctaggattaatttccatctgtgctcaataattaccactagacttctgatcctttttcagtcactatagcttcttttttatcctggtacccttccctgaaccaagcatagactgccctatgaaataggacagctttggtggtatgtggaaggttggatctatttttgtaggagtacaaaactataaaatgattaaagataatttaaacgagtcaaaataggcagctactgtatagggtgaagtacatttgttttcaatatttggtgagctttacaatgactagagaaatgcttgttagaaatgcagatatccaggctgcattccacatatatgaaatcagactctacatagatgtactctcgttatctacatttttaccagaccttgctccccagctttttctaaagcagaccaaagttgaagaaccatcagtgtggagaaaggaacttagactgagtcaggagatctgtgacctaatattggtttcctatgaacttccagtatgattttaattgcatcatctccctttacctctactgagacctgtgctcttcctcctgaagcccttctctttggaaatggcaacatcatctatttggttccccaagccagaaaccgagaaatgactaattccttcctttccactcctattatctaataaccctaaatccagttgattacactttatggctattgaatctgctaacttttctccatccttatgcttcctgaaaaccaactgccatactataaccagaatatttattttaataaacaaatctgctaaaactttttaatgaccactgcccttgggataaatgctataatagattccttaggtagcttacaaggggctgcaagatctactcgactaattctccagcacaacacctccactcccaattctgcacttttttggcagtttccttagccgtgaggcttttgcatgccactacttctgtctaaagtatcttacctttttcatgcccaaccattcagtcaactggataactcctgtttaccatttggaagtcagttgtgcccataatccttctctaacttcttttgattaagggacacacaaaataaatatatatccagtgggttagaattgggcatttgtctctgattgtagcagtaggcatagactagaaacaggatagctgtaaaagtttaaccttaagtgagggtggtcacaaaatttttaaaaagcatgttagagagtcaacgggttaaaccacctcccttctgctccatcaacccaggtgtccttcttatatgtctccccagtactggcacagccatatatagcactttccacagagtagtgtgattgtgtttacttctgtctctccacactagcaggcagggacttgtatcttatttattagcatgttcctagagtctagccaagtattaggcatatagaaaaaaactcaataattatctgtagaatgacaatggtgatgatagtaatatttattattatttatttaaaaaaacatactatattccaggcactgagctcagtcttttatatgaattcttactaaattctgacaacaatgctccaaagtagagtgtacagataggttaagtaaaatgcccaaagtcacagaaatggaggagccaaaatacaactcgaatagttcagagcttatgctcttaacccctgtattataataaatatgttttagttttcttatttgtaaaatgaggggggttaaatagttaaatgtccaagatgcttttaaaaaatgttgtgaccattcttacagaaggttagacatttatatctatcctgtttctaggctatgcttactgctacaataaaagacaaatgctcaattctaacccacaggatatatgtttattttgtgtgtcccttaatcacaaggtttcttcaagagttcttgaactccttgaatggtatagaaatttttgtgtttacatacatattttccaccctgaggggagagtttataatcttttataagattctccataggcaaaaacaataaaataaacaaaaagattagctattaatatgaatgatctttccattgtctccctctttcttattatttctgtgcaatacctagaaccatactagaagttggtaggctcaaaatgaagaatatatattcaaaacatgttattggaagggcataattattgtctgacctaataatatttttgtttttagacatctttctcattctctcaaccatgtccaatgtctttttcataaatgtaactcctgacctacctgtagattatcacacatttcttggctgtatgttaaccgctgaatttcagtaggagagacgaggtataatgcctgtccttcattggtaaaacaaaatgttcgtgctatcctcatgtctgtcagtggcaaataattaacatccaacattgggcgaagactaggtaggctgaatggaaaaaagtaaatccatatatcatatgcaggttgttagaagcagatatttacataaaaacagtaatttttattctattattttatggttgtttctttttatttttttatttttatatttttttgagacagagtcttgctctgtcacccaagctggagtgcagtggagttagctcactgcaatcttgccttccaggttcaagtgattctcacgcctcagcctcctgagtagctggaactacaggtgtgagccaccacacctggctaatttttgtatttttagtagagacagggttttgccatgttggccaggcttgagccaccatactcggcctggttgtttcttcttatcttcaaggctcagtggtaataaactagactttctttttttctttttcttttgttttttttttttttttttttttggagggagaaacaactttattttcatcagaaatagtaatgtttacaaatttgtttatagtagtttgtaaactattatcagaaatactaatgtcaataaaccacttaaactttaagagataattgggaactatgatgagggtgataataaaaggagaaatcttacaaaaattaacctggatgttatgcttgctctaagattaagtcactagggaaacagattcagtattatccaatggcttaaccttccttccttccttttgttccctttttggtggtggctgggttacaaagagtagtgtcttctgccctgaaggtagcagtagtatggtgggtgcctagaggtcaattattggtttagaagagattcaggctcttaacttctacatgtgcttcccaggagggggaacactttctttctcagccctgtgtgaggaccatgttagcccagaaagtgttctcagaccactgggtgcccattctcagtgttagaaacaggaagaccctggtttcctggcagaaatggatcctacagttttctctccatcaaactttaagtcacagtaagacaggactctggagtcacaggcacagccaggagaggtcagcatccttatgctgactcctgttcctggacatgggtcttaagatccaataaactagactttcatataaaatcatataaataaaaatcacaggcacagttcttttaattcacatagatgcttagcaaatgttcttgatggattaaatgcagtggccagcaatttcaggggcactttttgtagcacttcacatgttcctacaatgacagcctttggctatgtcagaaacaccacagctagaaagtgtctgactgcatacttggtctattgtctttctttaaggcaaaactgacagagatgtgttgtgggtccagttcactgtgcctggaaatgaagtggttttgctccccattcctttactcactctatacacaggaaatgaaaattacccataacttagggcaactgcactggaggcatgactaataagtaaatatggccaagactgtaagggaatgagaataagttataaataatagatcagaatttgcacatccaaatgaataccatctgaattgtcttaccccatggctatatgcttatcctaatgtagcagataattttgctaaaatattcatcagaatgtccttttggatactgtttttcgagccagttttacaaaccactgaagaaaaccagtctcattgccttttaatcagtcctttaatgccaaaagggaaaaggtaaacttgtaattaaattttgaaaccattatactgattctaagtgtgcacaatgattttacattgtcctagatcataaaaccagcaccttgaaaaaaatactgatttcctttatcaaagtggtttgtaactatactttgagacctggaaatttactatgtaaaatgggacctgaaatctgtgctattggactaagcactgtgctgtccaatatggtagccagtaaccacatgtagctattgagcagttgatacgtggctcgtctgaattgagatgtgctgtaaacgtaaattacacactggattcaaaagcttcattgatgaaagaattacctaatatcttaaaaagatattaaaagatgatctgttatagcacttctggtaactaagctccttaagatatgagtccaaaccaatcccagttaaacagatttccatgacagattcagtcaaattaaagggtggagttgaggaagaggttccaactgacttttctgatgtgctacattgtctatattgtataataacaagtaagccaagaaaagaaaattaaagaggtgtagtcacttcaggtaggaaaagagaaagagcaagtcagttgctaactgctaggaaacaattgctcttataacagaagaaaaaaagactttcttctatgcaggacactttaataaagaaatagtgtcgggtaactaaaggtggatctcacaaaaagtgtctcttacagccaagtttgagaattcatacaaagataagcctcttctatttctcctctctactctcaaacttgcttttctgagtctgggtacttaggatctaagtaaccactggctagctacctgatatctatcagaaacccaggacttgagaagactgggctcaggagagttaccttctgatagggtctggaaagatcctgggaatatactcagtatgggaaaatgaatgaggccaggtgcatgctaatttgtaggattcatttctttaaaccatagagcagagtacataccattgtttcctagctacactttatgtatatgtattattaaaatcatatcaaaattatttccttttcagttatttttgaggatcctcaggaacacatgaagaatttctactatgacacaatatcaaagtaaccattatcatgtcaagcagcttttataaaggacagaggaagacagataccatttatcaatgactcaatgtatgtgtgtgagagatacacacatttacacacatacacaaatagaccttttttcccccccaaatctgaggcatgtatgggagttaaatcattttcaaacaagattgaaatgaccttatcagaaatttctaaaaacagtttgagaaagggggaactagatagaaaagaatcagaaatacatgagagaatgaacagaccataaaatgattatttttattcaaaattttctcctttactactttcccttgacctacaaatctgctcatattttccctatctaaaaaaaaaaacactctcaaaacctagtttcactcttaagcgactttcctgtctcatctctcttttaaccacaaaatttcctgaaagaataatcaataccaggggaaaagggcccataaatatttatgatagtaaatattttaggctctctaggctatatagtctctgttgcaactattcaactctgccctgtagtgcaaaagcagccatagtcaatatacagaaacatgggtgtggctgtgttccaaaacctttatttatgggcattgacatttaaaattagtataattttcacatatcatgaaatattcttctctttgagttttttcaaccattaaatatgtaaaaaccattcttaatgcttgcaggctgtacaaaatcagataggggaatggaggtcgattttgttttggatattaatttgctaaaccctgatctataccactgcctctattcttgtctccttgaaaattagcttttgtttccaccatgctgctaagatttgctttctcaaagatcattaatatcccaccagttgtgagatctactgtttttttcttgtacccaaattctttgacctctctgctatattttactacctcttgacaacctcttttgttttaatattcttctctttttatttaatgaagttatacaattctggtcctttcctatctttctaataacttctcaatctcctttgctgcatcttcttctttctttcactacataaacgtagaatacccccaagtttctatcctcagctcagtcaatttcttgtttctttttatgctatcttttttattatctcatttcctgacataacttttactgatgcatttacatagatgacttccaaagctggaccttccacatatatttttctaagagtgcaaatcttaaatttattgctaaacctctgctggatggcttataacacctaaaatttcaaatatttattctcaatttattattaaatttctctttattggctttttcaaatccttctgactttcctatatgctaataacataaccgttatctaagttcaaaaaaatttttaacctttaaactctcttctaacctcgagatttaacaacttccattactgttcataaccaatcagctttgcattcaataagtttcccttacacctgtttcctcgttgccttcaatacagacaccacttcagttcaaaagcctatctcaacttctccctccctgtgtatgtcctaacacatggctagagaaggttaattacctgcttaaaaccccatttcctattaattgataaatgtcaaactcagcctgacattcaaggtcgtcaacaatttgcttcaaactacctctccatgttactgtcctcccaacaactcttcatttataatacatgttcaactatgctgtgactttgaactctgggaacttagtttgtggctagaaaattcaatcccatatttcctctgttggaatttatattttctttttgttataatgtctgtgtatctatcttatctcccaagttagacagtgagtttcttaagggttaggaccatgttctactaatttttatatccttcacaggcctagcacagtgctcatctcaatgatttttggaaataagtgagatattaaaaaaatgacagtgacttctatatagtatacgtttatgagctatttgctgaattcataaaatcattaggtaattatttttgtgtctcgtaaattttatttcatttcactaacagtagaatgaaatctcttgaccaatattttattttataagtatctgataacttttaattatcagactggcctcacttttcctagacttgcaacctcaggcaaactgtgtaactttattaacacatgtaaaatggaggatgcaaataatagtttattttcctatgtcctagagaagttctaaggatcaaatgaaactctgtatgtaaatttcttgggtgaagtatcaaacacaggaaaagtaaaagttaacttcttttctatttagcttattcatcttttatttccagtgcttagtgtagcatctgggagatatgctcaataaatatttgttgaatgattgaaaaatcattcttttcttagattccttcaaaacaattaaaaatatatttcactcacaatgccaagcatttttagcagaaaagaaaaaccaaaacaaaacacaaaacccccaaactctcatcaaatcgttgaacaataaaacatccagaaacataatgaaacaataatctcagtttgcttcttgataacatctgcacataacacatatattttttaggattgtaccttgctggtattgttgtgattaccagataatttataagaaggcaagtacctcattatcatgatatgtccgttagcacaaaagcatgccaagcaggcactgctacacatgaccaccacatttgcttgcagtataaaagatgtctccgtgatgttatgaacataaaggcaagtctgagaaggcagtgagaagactttggcttgtttttctgagcagattattgtatactgatgatctcctatttcttgggatgcagaagatgagttcattaccactttccttctccaagatttttcattttcatctatgttgtttggatccctccaaacttcatatggcggttgcattaatccacccattcggtccatacaggagaatgttagcacagctcctttcaatgagaggaatgtacctataaaaacaattggacatcactgacatgtcaaattcattctaaagcatctatagggaattaaagttttacattgtgataatttatacctatagagtcataatattgccctaatgtatatgaatttgtagatttgtgagctcatctgttataataagttggaatcatagaatgttaggtctaaaaggaacttaagacgtcaactggtcaaaccctctcattatattaaaaaagaagaaaaaacagacccagaaagattatgaaagttgggccaggtcacacagcaagttaggtcacagcctagattagaactcagatttttctgattcctaccccacgattctttcattatactatatagtcccccttaaagtccttttataaaaaagaaaattttaaaaatgtacatattttatttattgaaataacttcaactgaaaaataatcacacaatcttatttgattttcttatttcatagactaatttgctagaaaatgcttgatttttcttcaaaatcaaacaagaagaaatttcaatatctggaattcacggtggcaattttaattgtatgaaaaagacaaaacaattaccttcagctcttaggtaggcttttgcatctttacacagaaaggggttttactcacctggattctccaaggttgacaatgtatgccagattatcgcctataggtgattttcaccagtcttggaggacaatatactataaagcttaggaggtagtttgggctctattgatctttggatatttccagaatcttccctaagcagtaccctattagccctttctttcctttgtccttttacatcatgcagagaaagtatgttagcttagactgataatgtctcaagggtgtacatgtgacagagacttgaaaagggaagggtgacagataaaagtatattcatttagaaagtacttacaaagtccttaaaatttatcaaattgaaaagagtatattgggatgatctaatatcttagttgtgtttttaaatccacttcaaaactaagaaatctataaatgtatataagggtaacggcagaggctaggggagtagaggtttaggtgctgcagtttaagggttaagggataaaagaacatctctcccaatctcccatgaaggaaaaatgccaacagctctgaagaatgatttaattaaaattaacctaggattgatcctgctgttcagtaaaaccacattttcctaactacctgccatagaaagacttttctaagtatatcttttcatccttgatttagagatggctgacagtaggttaaaaagacaagaaatccacattttgaaagccattttacttatactcattgcatacaatcttcagcatcaaaatgaatttctcaataagctgcccttgccaaaacagctgctttgtttcttaatttttagtcataaatgctttgattatattctgttcattaggtttatacagggtttaagttttccaaacaatgtattattaatcgtttagaattctttctttaatcttttccaactggaaaaaactcaagtaaatctaaattataagcagctactacttcagaaatacacttacaaagtatgcttaaacttatgggcttcaataataagatcttaattaattaggactttcctcttaaagaagaactcactggctaggagtgtactttactccagctttcccaaatcaccagccttgccgactacaaccttcattcaatcaatacatacagtatcaagtacattctatgtgctctaggctctattttagtcatagtcaatatagtggtgaataaaacagacaaaagtccctgccttcataaaacttactttctagggtagagatagataatatgtctgataaataagtaatcatatgggatattagatagtaatgagtactaaggaaaaaaagcagaaaagaagataggaattcttgaaaaaaggtagataaattttaaatagtgttatagactgaatgtttgcatcccctgccaacctcttgtaaaaaaaatcatatgttaaagccccaacccccactatggatctatttgaagagggagcctttaaggaaataattaagattaaatgagatcataagggtatggctctaatctgatagaattagtgtccttttaaaaagagataccagagtacatgctctctctctctctccccctccctatgtgtacacaaaggaaaggccatgtgagcacacagcaagaaggcagccatctgcaacccaaaggaagagacctcactagacatctgccctgctggcaccttgaacttagagtttcagtctccagaactgtgagaaaataaatttctgctgtttaagccactgagtctgtggtatttcattatggcagcctgagcaaactaataaagaagggaaggcttcttttcatcatcctgtgggaattagggttcaggaaaccagcacaaaatactgatattctatgactgttgtgaataataaattatcctttgtccctgagccaggagtttcatgtcttctatcagcatcgaaactggcaacctaactttattagcttacaagtagaataaaatctcagattctttataggtcttgactttctagaatgccaagaagattcataggaggtaagatcagagagataaagtagagccacatcatgttggttctttcaggacatggtaaagacctagacttttacttggcgtgagatggaaggattttgagaatggaagtgatgtaatctaactttcatgtaacagaatcaccctacctcctgggtgtatcctaaagggaaccaaggctggaagcagggagagcagtgaagaggttagtgtattagtgtgcgtgaaaaatggatagaggcttggttgaactgtgtggtaatagtacagatggtgagcaatgtcagaatctgagtgtattgtaaaggttgtgccagcaggatttgttaacaaattggatttagggtatgaaagaaatatgggggtcaagggtgattccagtgtttttgacctgagaaactggaagaatggaattgtcattaatagatgtagaaaagtgtgagaggaatgagaggaataccaggagctcaggtttgaacatgttaagtttgggatacttactaaacatccaaatggatatcaaatagctggatatatgttaggaatttgtggagaggtccagactataaatataaatgtatgatccatcagacatttaaaggcatgaagctggctgaattcatctagtgcttcaatataaagagaaaagtttcaaagaatcagtcttggggcattctggtttaagtccactgaaatggaggaggaacaagctaaagagattgagaaggaatagctagaaggtaggaagaaaatcaggtgaaaatagcactctagaatttgaagtgttttaaggtaggaatggtagcctgtgtaatacgttgctgatatgtcaaataagatgtttcctgagaaatgaccaagaattcctatctccttttctgctctaattttttccttagtacttattagtgtctaatatcccatataattacttatttatcacacatattatctatctctaccatagaaagtaagttttatgaaggcaaagacttttgtctgttttattcactactatattgcccatgactaatacagcctagaacccattgtttctcttttttaatggaagatataacaatatatttatataatgattcagtagaaagaaaaacatttattataaaggaaacaaaggaaaaattgctggattgactttctgaagtaggtgaaagcaggtaaagtctagtatataagtggagtctagtgtacaaacagagtctagagtataagtggaatatagtgaataactaccacacagttcacacaagcctctatccatttttcatccagactattgtattaacctcttcactgctctccctgcttccaaccttgattccctttaggataggccaggagatagaatgattctgttaaatgaatcacctagttagaagcttagtttagtaactgtaacaggagagaatatgcaggccatgaagatacaagcagataggttggtagatgtgatgatagctgttgaagtttttatctgattgtttcaattttctcaataaaagaggacacatggtgattgctgagattgaagacagaaaagcaagttttggagatttaaagagactagagaaaatacgtaattgttagccaggcatgatggcatgcctgtagtcccagctactcaggtggctgagatgggaggatcgtttgagtctagtagttcagggcgacagtgagctatgattgcaccattgcactacagcctgggtgacagagtgagacctcatctataccaaaacaaaacaaaacacacacacatacacacacaaccaaaaggataaacaagaaaatatgcaattgttgtccaggagtgcaggggcaaggactaggaaaatatagtatgattacctagcagcataagagcccacttgaagttagtgatgatttatggtaaaatgagacactttagtgtggttatgtatttttctctagccatattcagctacatgggtctagaaataggataggtagagttgaatttaatcaggtttgagattaagctgaataagtatgacaaagcaaacaaagcaaaaaggaggcaagagagttgacaatgcatgaaagaaaagcattatagagcttgactgtgaaattaaagttagaaagggggaacatgaagggggtgaatgacaatgaaaatggtaggatcaatagattaaggttccagtgaggctgaagaattatattaaagttggagtcttaaggagcctgagatatttgctttccttttcccttacatacattgtttaaactttaattgtctctcaacttccacggaacttctcaattcctatctagaatgtaagctctttgaggacagaaacttcgtatgacttcgtcattactttatcttcagtgcttattataatatctggacatgtcatgtgctcaataaacatttattaacttcctgactactccagttcagtcttaattatggatttttaaacttctattttatcttatatactcaagatcagctacacaatttgtgggcctagcacaaaatgaaaatgcactaggcctacaaattatgggggactttttgttcaaaaattgggagaactagcacttttctgaccactttttgtcttcaaggttttatttgaaatctcttatgtgctcattgtcctccaccattctctttgtcactgtaaatctaattcctttttttttttttttattatactctaagttttagggtacatgtgcacattgtgcaggttagttacatatgtatacatgtgccatgctggtgcgctgcacccactaacgtgtcatctagcattaggtatatctcccaatgctatccctcccccctcccccgaccccaccacagtccccagagtgtgatattccccttcctgtgtccatgtgatctcattgttcaattcccacctatgagtgagaatatgcggtgtttggttttttgttcttgcgatagtttactgagaatgatggtttccaatttcatccatgtccctacaaaggacatgaactcatcattttttatggctgtatagtattccatggtgtatatgtgccacattttcttaatccagactatcattgttggacatttgggttggttccaagtctttgctattgtgaatagtgccacaataaacatacgtgtgcatgtgtctttatagcagcatgatttatagtcctttgggtatatacccagtaatgggatggctgggtcaaatggtatttctagttctagatccctgaggaatcgccacactgacttccacaagtgctagttgcaatagtaggtaggggatgctcctagaggttaggaaagcaatcgtggtgccctacagaattcggaagaaacagtggagatttgaagggagacacacagctaaaaactgatttgttatttgaaaaatgaacagagcaatgcatatactgcctgtgaacccgcatactgaacacatgcagccaggcagcctctcagggggcaaccattgctgtcatttattctgtcatatgttaatactgcctgctcttggatttcatataaatgagcaaaacatataaaaaaaaaattgggagaagaggtaccattgaaggttgcaaattataaagcttttttctttcttctgtggtctatctctttagtgtttttatatttgctatttatgttctatgtaaaggaaagttaactttttttattattcataatattctatataagaacatttaacctctattttgaactgtagcaaaaacacaatagctagtctccagagctatgaaatgattattcacagggagttggccagaagagacaaaccagtcagtctcaggaaggttggaaggtggaagacagggtcattcaagtccagaccagacctgagggagcacattcttaggtatggggatatctcttgcagcttgagaatgcttgcaagatgactgcagactttcacaggcatctgagggtctcaccacatgacttcagttacttaagtacatttgagtctgatggctgctaagtttctcctctttacagcaataagaccccatcctgccacctcaaaccatagaagaggggtgactcccagaaagtctttaaaactgtttgctaggaagtgctagctacctggaacaggactggttaagactctcaatctgagacatggcctctggttggccgatcacatgctagagtcaccaagtactaccaactcaggataaggatggctgcttccatgccccaaaatgtcaccaggcatgtgcctgaccccgaccacctctatgtatactccaggccccaaaagcagtggaaagtgaaagtggaatgcctctctcccaacaaactaagtcatcgcctgggtgagaggtaggtgggaggcagactgctcatgagcagaggcttcaagcccctggtgcatgctccattgtctcattggtctttacttacaaagcatacatcaaaagataaaattattaagaattttaagactttaagagcagagggccttctgggagcagaaccctgtgcatcagtagacaaaagggacaagtaaggtttcatttttgtagactcagcacatctgggaacttgctaaaaatgcaaattctcagaccctccctcagacctactgaatcagaaactttgggggcagggcccagtaatctgtgttgtaatgaatgcttcaagtgattttgatgcagacaaaagtgataggtgttggaaacaggccccccaaaatctggccataaactggccccaaaactagccataaacaaaatctctgcagcactgtgacatgttcatgatggccgtaacgcccacgctggaaggttgtgggtttaccagaatgagggcaaggaacacctggccctcccagggccgaaaactgcttaaaggtattcttaagccacaaacaatagcatgagcaatctgtgccttaaggacatgctcctgctgctgttaactagcccaacttattcctttaattcagcccatcccttcatttcccataagggatacttttagttaatttaatatagaaacaatgctaatgactggcttgctgttgataaatacgtgggtaaatctctgttcagggctctcagctctgaaggctatgagatccctgatttccttcttcacacctctatatttctgtgtgtgtgtctttaattcctctagtgccactgagttagggtctccccaaccgagctggtctcagcaagtggcatccatcatgggggcttgaatccaggttgaagggtcactggagcaatggttggagaacatggaactagctggaggacacccgagtactcttaaagcaatccccatggtgagtaagaaggggagctcagaagcatcagggtaacaatgggacaagtgtggggtctggttcattccaccttggaactttttcacactgatgaggaggaggaaggagagtataatgaagtacagaagaggttacagaccaggcttatttgccagctaaaactaaagtggaaaaggagggagaggttcatccctacccttctgcaccccctcattattattttgaagaaaaagagtggcctgaccctccagatctttcttttccggaggacactgggtgaaaagtagttgccccagtgtctgttcgagcagtgcctcgagcgaccactcttagttttattcaggtaggaattcagcaagctagaagagagggtgatttagaggcttggcagttccctgttagaatacagcccccagatcagcagggaaatattatagctacatttgagccttttccttttaaattcaggaaagcacatttagttgattatatcaaggcctgtgatggtattggaggtaatctgcataaagctactttgttggcacaggcaatggcaggactgagagtggataaaggaaatactcatttcctggggcttgttttaactgtgggaagcatggtcatactaaaaaagaatgtagaaaaaatcagcaagtcaggccgccagataagggaaaaaagaaaactgctgagcctgaaatatgtctaaaatgtaaaaaaggaaaacattgggctaagcagtgtcactctaggtttgataaagatgggaacccgattttgggaaaagccatgaggggcccatcctgggcgctgttctaaactggggcatttccagctcaggccattccctcacccctgtacaatatctgtcccccaccacagccggtagtgccgcagtagatttatgctgcacaaaagctgtgagccttctgcctggggaacccccacaaaaggtcccaacaggagtctgtggatccttgccagcggggacaataggattacttttagaaaggtctagtttaagtttaaaacgggtacaaatacatacaggagtcactgactcagattacaatggggaaattcaaattgttatatctacttctgttccctggaaggcagagccaggagagcacatggcacagctcctgattgtgccgtatgtgggaatcggaaaaagtaaaattaaacgaacaggaggatttggaagcacaaataaacaaggcaaagctgcttattgggtaaatcaaattactgataaacgtcctacctgtgaaataactattcagggaaagaaatttaaaggtttggtagatacaggagtggacatttcaatcatttctctacagcactggctgtctgcgtggccaattcaacctgctcaatttaacatagttggagttggtaaagcccctgatgtatatcaaagtagttatattttgcattgtgaagggcccgatggacaacctgggactattcaaccaattataatttctgtacctataaatttatggggaagagatttattacagcaatggggagcacaagttctaattccagaacaattatatagcccttaaagtcaacatataatgcatgaaatggggtatgtccctggtatgggactagaaaaaaatttgcaagctttgaaagtaccgcttcaagtggaaagacgatgttcccaccaaatattaggatatcattcttgatggcggccattgttaagcgtccagaacctatacctttaaaatgattaacagataagccaatttggatagaacaatggccgctaagtaaagagaaactggaggcgttagaggaattagttactgaacaattagaaaatgggcacatagctccaacattttcgccttggaattctgcagttttcgtaattaagaaaaaatcaggtaaatggagaatgttaactgatttaacagtcatcagttcagttatacaacctatgggagcattacagccaggattgccttctcctgctataattcctaaaaattggcctttaatagtcatagatttaaaagaccgtttctttactatccccttagctgagcaagaatgtgaacggtttgcatttacaattcctgcagtaaacaacctgcagcctgctaagtattttcattgtttcacagatgggtctagtaatggtaaagcttcttattctggatcgaaaagtaaagttttccagacaccctatacttcagctcaaaaagcggagcttgtagctgtaattgaggtattgactgcttttgctatgcctattaatgtgatttctgattcttcatatgtggttcattccacacagttaattgaaaatgctcagttacaatttcatacagatgaacaaccgatgactttatttacccaattgcaaacagcagttagaagtagaatgcaccctttttacatcactcacattagggctcatatacctcttccaggacctttgactgaagggaatcaaatggctgatcacctagttgctaatgcaatatctaatgctagacactttcacaatttaacccatgttaatgcctctggtctcaaatgcagatacagcattacctggaaagaagctaaaaatattatccagtgatgcccaacttaccaaatggtacattcttcatcttttacaggaggagttaatcctcgaggattggaacctaactctctttggcaaacggatgtcacacatattctctcatttgggagactagcatatgcacatgtatgtgtggacaccttttttcactttgggctacatgccaatcagaagagtctctgcctgtgttaaacatcaccttttgcagtgttttgtggtgatgggcattccagcctctactaaaacagataatgccccaggctatactagccaagctctagctacatttttctccatgtggaatattaaacacattgctggtatcccatacaattctcaaggacaagccatagtggaaagaatgaatctttccttaaaagagcagttgcaaaagcagaaagggggaaatagagaatatggaacactgcagatacaactgaatctggcattattaactaaattttttgagcctgcccaaaggccagatgttatcagcagctgaacagcatctacagaaaccagctgcaaagagaagcagaacaactgatttggtggggagatctgataacaaaaagttgggaaataggtaaaataataacttggagtagaggttatgcttgtgtttctccaggccaaaatcaacagccaatttggataccatcaagacacctgaaactttttcataagccagatgccgaggaagagattctgggaggatcccgaggacccctcggttgcagccatgtcgagactgacgctgaggaggaccccaactgtcacaagcaacacctgtcgaacacagccacccacctggggacagatcaagaagctgtcacagctggtggaagaaaacctgaggaaagcgggacaaccactcacaatgagtaatttaatggtagctatgatagcagtatcaccattgctgtgagtattccttcaacaagggctgacacagagaacaattatacttattgggcatatttatcaaacttggctggcaataatgcctagatgtaatcactctatgatgcagttgcacatgctttctgatctcagtatttatcataataaatctgctcctataattgaggcataccaccctcaaaaacctatttgtaaacaaaatggaacctgaccagaaaaaaatgcaagaatattttattaatgactaaaggtttagcagaaacaatttaacatatgtatcatactcatctgtaagactatgcttttggaaaactcagccttaattaaaagtcataatttttaatttcttatttgtttgaaaaaattttcatcattttgaatttatatttccacagtccaagattatttcttctgtttcagacttttcttatgtgaaatagaagagttttgttttgttttccgtttggtttagcctgaaaaaagatgtaaaattgcaaatacctcaaaactacatgcccaagtaaggatgtgtataattgacagtctttcaatgtttgccagtcacacatctaaagggttacttactatttctgctctattaagaaaagaactatatatctagttcattgaattttcacaaagaatgataatagattttttttcatctgtctatataagaaggggccctattctggcaaaagtctgaattcatgccactaaaaaatgacaaaagggtaaatgaagttttatttttgataataatacctgaagggaatttcatttttcttcagtgaattttaaaaatctaaaaatcctttaaaaccctcaacagcctgtaatcccagcactttgggaggctgagacgggtggatcatgaggtcaggagatcaagaccatcctggctaacatgtgaaaccctgtctctactaaaaaatgcaaaaaattagccaggcgtggtggcgggcgcctgtagtcccagctactcaggaggctgaggcaggagaatggcctgaacccaggaggtggagcttgcagtgagctgagatcgtgccactgcactccagcctgggcgacagagtgagacactgtctcaaaaaaaaaaaaaaaaaaaaccctcaacaaactagacatacaaagaatatgcttcaaaataataaaagtcatatatgacaaactcatagccaacatcatactgaacagggaaatgttgaaagcattccctctaaaaactggaacaagataaggatgtatactttcaccactcctatgcaagtcctaaccagagcaatcaggcaagagaaaaaaaaaaggcattcaaattggaagaaaggaagtcaaattattgctgttcactgattatatgatcttataactagaaaaccctaaagactccttcaaaagactcctagatttgataaatgacctcagcaaagtttcagtatataaaaatcaatgtataaaaatcagtaccacttttatacactaataatgatcaagctgagaaccaaaagaagaaatcaatcccatttataacagctattaaaaatacctaggaatacattaatcaaggaggtgaaagattgctacacggaaaatttaaaaaacactagtgaaagaaattgagatgacacaaacaaatgaaaaaacatcccatactcatagattggaagaatcaatatcattaaaatgaccatactgcccaaaacaatctacagattcaacacaattcctatcaatttgccaacagcattcttcacagaagtagaaaaaataattctaaaattcatatggaaccaaaacagtctgaatagccaaagaaatcctaagcaaaaagaatgaagctgcaggtatcacattgcctgacttcaaattatactacaaggctataataaccaaaacagcagagtactcgtataaacatagatagataaatggaagagaatagaagacccagaaataaaactatatacctacaactaactgatctttgagaaagtcaacaaaagcatccactgagaaaagaacatcttacttaataaatggttctgcaaaaattgtataaccatatgcaggagaataaaactggacccatatctctcaacatatacaaaaagtaactcaaggtgaattacagatttaaatgtaagacctgaaactataaaaatgctagaaggaaacctagcaaaaactcttgtgtggacattggcttaggtgaagaattcgtgactaagacctcaaaagcaaatgcggcaaaactaaaaatagacaaataggacttaattaaactgaaaagcttatgcacagaaaaagaaataaacaacagagtgaataaacaacttgaggaatgggaaaaatatttgccaacaatgcatctgacaaagggctaatacccagaatctgcaaggaactcaagcaattcaaaaaggaaaacacaaataaccccattaaaaagtgagcaaaatacatgaacaggcacttttcaaaacaacacatacaaatggccaagaaacgaaaaaaaaaaatgctcaacatcattaatcatgagagaaatgaaaattaaaaccataataagataccatcttataccagtcagaatggctattaataaaaaataaaaaaatagactttggcaaagatgcagagaaaagggaacgcttatacagtattggtgggaattagtttagtacaacttctatggaaagcaatatggagatgtctcaaataactaaaaatagaactatcttttgatcaagtgatcccactacctgctatttatacaaaagaaaagaaataatcatatcaaaaagacacaagcacgtgtatgtttattgcagcactacttacaatagcaaagtcatgggataaacctaagtgtctatcaatgggcaattggattaaaaatgtgatatatatatatatatatatatatatatatatgccatgaaatactactcagtcataataaaatgaaatcattgctttatacttgactacacactgggcttattaagtgaatgacaaggagtttggtttgtctagggcccaggatatgtagtgaaaggtcaaagactataaggctggaaaagaatggtggagctggggaatggaaggtctaaatgccaaggattcctttcaattgctatataaaagaatgtaaagactgcgggcgtgttccaagatggccgaataggaacagctctggtctgcagctcccagtgtaatcgatgcagaagatgggtgatttctgcattccaactgaggtaactggttcatctcattgggactggttggatagtgggtgcagcccacggagagtgagctgaagcagggtggggcattgtcaccttacctgggaagcgcaaggggtggggggatttccctttcctagccaagggaagctatgactgactacctggaaaaacagggcactcctgcccaaatactgcacttttcccaaggtcatagcaactggcaaacaatgtgattctctcccatgcctggcttggcaggtcccatgcccatggagccttgcttactgctagcacagcagtctgagattgatctgcaaggtggcagcctggctggggaggggtgtctgccattgttgaggcttgagtaggtaaacaaagtggccaggaaacaaactggatggagcccaccacagctcaacaaggcctactatctctagactccacctctgtgggcagggcatagctgaacaaaaggcagcagacaacttctgcagacttaaacgtccctgtctgatagctctgaagagagcagtggttctcccagcatggtgtttgagctctgagaacagacagactgcctcctcaagtgggtccctgaaccccatgtagactaactggaagacacctcccagtaggggcagccaggcacctcatataggtggctgcccctctgggacgaagcttccagaggaaggatcaggcagcaatatttgctgttctgcaatatttgctgttctgcagcttctgctggtgataccaaggcaaacagggtctggagtgggcctccagcaaactccaacagacctgcagctgagggacctgattgttagaaggaaaactaacagacaggaatagcatcaacatcaacaaaaaggtcatctacaccaaaactccatctctaggtcaccaacatcaaaaaccaaaggtagataaaaccacaaagatggggagaaaccagagcagaaaagctgaaaattctaaaatcagagcccctcttctcttccaaaggatcacagctccttgccagcaacagagcaaagctggacagagaatgactttgacaagttgacagaagtaggcttcagaaggtcagtaataagaaacttctccaagctaaaggaggatgctcaaacccattgcaaggaaggtaaaaagcttgaaaaaagattagacaaatggctaactagaataaacagtgtagagaagaccttaaatgacctgatggagctaaaaccatggcacaagaacttcatgacacatgcacaagcttcaatagtagattcaatcaaggggaagaaagggtatctatcagtgatgcaagatcaaattaatgaaataaagtgagaaaacaaggtagagaaagaaaagtaaaaagaaatgaataaagcctccaagaaatatgggactatgtgaaaataccaaatttacgtctgattggtgtacctgaaagtgatggggagaatggaaccaagttggaaaacactcttcagggtattatccaggagaacttccccaacttagcaaggcaggccaacattcaaattcaggaaatacgagaagaccaaaaagatactcctcgagaagagcaaccccgagacacataattgtcagattcaccaaggttgaaatgaaggaaaaaatgttaagggcagccagagagaaaggttgagttacccacaaatggaagcccatcagactaacagcagatctcttggcagaaactctacaagccagaagagagtgggggccaatattcaacattcttaaagaaaaaaattttcaacccagaatttcatatccaaactaagcttcattagtgaaggagaaataaaatcctttacagataagcaaatactgagagattttgtcaccaccaggcttgccatacaagagcttctgaaggaatcactaaacatggaaagaaacaaccggtaccagccattgcaaaaacatgccaaattgtaaagaccattgatgctatgaagaaactgaatcaatgaatgggcaaaataaccagctaacatcataatgacaggatcaaattcacacataacaatattaaccttaaatgtaaatgagctaaatgccccaattaaaagacacagactggcaaattggatgaagagtcaagacccatcagtgtactgtattcaggagacccatctcacatgcaaagacgcacataggctcaaagtaaagggatggaggaagatctaccaagcaaatagaaagcaaaaaaagagcagggattgcaatcctagtctctgataaaacagactttatactaacaaaggtcaaaagagacaaagaaggccattacataatggtaaagggatcaactcaacaagaagagctaactttcctaaatatatatgaacccaatatgggagcacccagattcataaagcaagtccttagagacatacaaagagacttagactcccacacaataataatgggagactttaacaccccactgtcaacattagacagatccacgagacagaaggttaacaaggatatccaggacttgaactcagctctgcaacaagcagacgtaatagacatctacagaacattccatcccaaatcaacagaatatacattcttctcagcaccacatcaaacttgttccaaaattgaccacataattggaagtaaagcactcctcagtaaatgtaaaagaacagaaatcacaacaaactgtctctcagaccacagtgcaattcaaatttgaactcaggattaagaaactcactcaaaaccacacaactacatggaaactgaacaacttgctcctgaatgactactgggtaaataacaaaatgaaggcagaaataaagacgttctttgaaaccaatgagaacaaagacacaatgtaccaggatctctgggacatgtttaaagcagtgtgtagagggaaatgtatagcactaaatgcccacaagagaaagcaggaaagatctaaaatcgacaccctaacatcacaattaaaagaactagagatgcaagagcaaacaaattcaaaagctaacagaaggcaagaaataactaagatcagagcagaactgaaagagacagagacacaaaaaacctttcaaaaaatcaatgaatccagaagctggttttttgaaaagatcaacaaaattgatagacaactagcaagagtaataaagaagagagaagaatcaagtagacgcaataaaaatgataaaagggatatcaccactcatcccacagaaatacaaactaccagcagagaatactataaacacctctacacaaataaactagaaaatctagaagaaatggataaattcctggacacatacaccctcccaagactaaaccaagaagaagttgaatctctgaatagaccaataacaggctctgagattgaggcaataattaatagcctaccaaccaaaaaaagtccaggatcagatggattcatagctgtattctaccagaggcacaaagagaagctggtgccattccttctcaaagtattccaatcaatagaaaaagagggaatcctcccaaattcattttatgaggcccacatcatccttataccaaagcctggcagagacacaacaaaaaagagaattttagagcaatatctgtgatgaacatcgatgtgaaaatcctcaataaaatactgacaaacgaatccagcagcacatcgaaaagcttatccaccacgatcaagttggcttcttccctgggatgcaaggctggttcaacatacagaaatcaataaacgtacccatcacataaacagaaccaatgacaaaaaacacatggttatctcaatagatgcagaaaaggccttcaacaaaattcaacagctcttcaggctaataactctcaataaactaggtattgatggaacatatctcaaaataatacgacctatttatgacaaacccacagccaatatcatgctgactgggcaaaaactggaagcattccctttctggcacaagacaaggatgccctctctcaccactcctattcaatatagtgttggaagttctggccagggcaatccggcaagagaaagaaatagggggtattcaattaggaaaaaaggaagttaaattgtctctgttttcaaatgacatgattgtatatttagaaaaccccatcgtctcagcccaaaatctccttaagctgataagcaacttcagcaaagtctcaggacacaaaatcaacgtgcaaaaatcacagacattcctatacagcaataacagacaaacagagagccaaatcatgagtgaactcccattcacaattgctacaaagagaatacctaggaatccaacttacaagggatgtgaaggacctcttcaaggagaactacaaatcactgctcaaggaaataaaagaggacacaaacaaatagaagaatattccatgctcatggataggaagaatcaatattgtgaaaatggccatactgcccaaggtaatttatagattcaatgccatccccatcaagctaccaatgactttcttcacagaattggaaaaaactactttaaagttcatatggaaccaaaaaagagcctgcattgccaagacaatcctaagcaaaaagaacaaagctggaggcatcaagctacctgacttcaaactatattaaggctacagtaacgaaaacagcatggtactggtaccaaaacagagatatagaccaatggaacagaacagaggcttcagaaataacatcacacagctacaccatctgatctttgacaaacctgacaaaaacaagaaatggggaaaggattccatatttaataaatggtgctgggaaaactggctagccatatgtagaaagctgaaactgaatcctttccttacaccttaaacaaaaattaattcaagatggattaaagacttaaatgttaaacctaaaaccataaaaaccctagaagaaaacctaggcaataccattcaggacataggcatgggcaaggacttcatgactaaaacaccaaaagcaatggcaacaaaagccaaaatagacaaatgggatctaattaaactaaagaccttctgtccggcaaagcaactgccatcagagtgaacaggcaacctacagaatgggagaaaatttttgcaatctacccatctgacaaagggctaatatccagaatctacaaagaactcaaacaaatttacactaaaaaaccaagcaaccccatcaaaaagtgggcaaaggatttgaacagacacttctcaaaagaagacatctatgcaggcaacagacacatgaaaaaatgctcatcatcactggtcatgagagaaattcaaatcaaaaccacaatgagataccatctcacacccgttagaatggcaatcattaaaaagtcaggaaacaacagatgctggagaggatgcggaaaaataggaatgcttttacactgttggtgggagtgtaaattagttcaaccattatggaagacagtgtggcaattcctcaaggatctggaactagaattaccatttgacccagcaatcccattactgggtatatacacaaaggattataaatcatgctactataaagatgcatgcacacgtatgtttattgcagcactattcacaatagcaaagacttggaaccaacccaaatgtccatcggtgacagactggattaagaaaatttggcacaaatataccatgtaatactacgcagccataaaaaaggatgagttcatgtcctttgcagggacattgatgaagctggaaaccatcattctcagcaaactatcacacaaggacagaaaaccaaacactgcatgttctcactcataggtgggaattgaacaatgagatcacttggacacagcgcagggaacatcacacactgggacctgtcggggggtggggacctgggggagggatagcattagaagaaatacctaatgtaaatgatgagttgatgggtgcaacaaaccaacatggcacatgtatacctatgtatcaaacctgcacatggtgcacatgtaccctagaacttaaagtataataaaataaataaataaataatgaaattattgccctttgcagcaatgtgaatgcagctggaggctgttatcctaaataaaatgactgagaaagtcaaaaactacatgttctcacttataaggtggagctaaacaatgggtacacttgaacatatgaaatagaataagagatactggtaactccaaaaggtgctaaatattgaaacctataaatggggagtatatatgttgactattgtgtatgaggcctttattattcttgttcagtcaaatataatgattatgtttgattttacaatgttattattgtattagttcttattgcagtttagaagagataaaatgtgtgaatttcataagtatatttgaaatatacccatcttatatcaaaagaccttaactaaataatactttaataaagtttttcatcaaggtttagacttagcattaaaaataatatcattctaatttcaattaaataatttccagacaaagcctattaaccagttttatattatatccataagaaagcacattaacctattttcatatttatataaattaatttactagttcttcaatggagaaatggactttaatggaattgaatgctggaaaataagtttgacttagggagtaaggctgggacaactctagagtagacagggtaggtccaaaagtgaaaattcaatgatgaaaataatactggtatatgaccagtatgaaggcagtgagtaaaagggatcagaagaaaaaaattgaagttatggaggctatttaggtagtatgatggctattaattacatttctgttaatattctactactaacagaaatgaaagagtgttaaaaataactagtttggaagttgatatggtttggatgtttgttccctccaaatctcatgttgaaatgtaatctccaatgttggaggtagggcctaatgggacgtattagatcatgaggatggatccctaatgaatggcttagcgccatctccttggcgattagtgagttctctctgtgctagttcacataagatctggttatttaaaattatgtggtacctccctcctctctctcttgcttttcctcttgccatgtaatgtgcctgttccctctttgccttccaccatgactggaagcttcctgaggcctcaccagaagctaagcaaatgtcagcaccatgattcctgtacagcctgaagagctattagccaattaaacctcttctctttataagttgcccaatctcaggtattcatttatagcaatgaaaaagcatctaccactggggtaaggagaatgaatttattctggagaatcttgactttaatcatgaatttaaatcttgagtttgattatgagagatatatattttatatatacacatatatattatatatgttacaaagcatgctaggtactttgtatggcagaactgatcattatagaataatttatagttggcagcataaagagttaagtagaaataaataaaacttaaaatgagttttaacaaatttctcaccaagttgctagtggagagtaaaattcctaggggaggaaatgaggatggggacggggacagagaagggacaaagtttgctagtggcagaattttcatttttttcctttatattttgatttttacaattataaaatttaaaatttaataactagatcttgaaaaaaaacccaatgttttgcatcacaagttttgtactgaaaaaataatctactaggtagtcttttccttcttcacgatttataaggcactgtataatcattccctgcctatttttccatcctcatttagtatcattctatctacagtctccagctatgccatgtcctctcttacttctagatttttactcacactgtactgactttagtctttcaaaaaaattttttttctagagacagggtctcccagtgttgcccaggctggtcttgaactcctgggctctagcattcctctcactttggtcttcgaaaatgctgagattacaattgtgagccactgcgcccagcctctgaattactcttaaacgccagtactgtacacttcctcccaaacttgtccaacttccacttcagatgtcatctttgttagggagctcttccccaaatccccctgccatgctgccatggtattctttatttctcttagtgtaatttccattattatactttctttattgtaattttgtgtttaattttgtttttccctacaagtctccgaaaacagggaccactgtatccccagtgcttatttcggtggtatgggcttggtaaatgtttgttgaatgagtggataaatttcaaagtagactgttttcaagtctaaggaaactatttgactcatgaattttcctaggccgactaacaaaagtttatttaacaacgttctcacaggaaaaaagatgcattcaaggtcagagagcatgtcactcacttcagcactgacaatggacaagtgctaaatgcccctaaatccaaaccttctttaatggttcccataagctatggcagcaaccataataacataaacagtacccataatagttcccataagcttgggcagagactcatgggtataggaaagaaaataaatatggcaaggagagtgaagaccgggacagttagtcaataagtaggctctgaaagaggaagcacaaaattttctactttaaatttaaacaagatttctgtcacccttatcttttccctcctttctttttactgccataaattatggctcccaagtagactttctttcttgtaatggttaattacagaacaaacatgggaacccagactcatggctttctcctttatatacatctttattcaacaaattaatagagtgtatttttaacagcagtttcagatttaaagaaaatttaacagatagtataaagagttcccacataccccttctgtcatttcctttattattaacatcttgtataagtgtggcacatttgatttaattaatttttttattatttttcattgagatggagtctcactctgtcacccaggctggagtgcagtggtgagattatggcttactgcatgctcatccttctggctcaggcacacacacaccatgcctggctaatttttaaaaattatttgtagagatggggtctcattatgctgcccagactggtcttgaactcctgggctcaagcaatactcctaccttggcctcccaaagtgctgggattataggtgtgagccactgcacccagcaatttttaaaaatatatatatttaaaaaaattttttggtagtgatggggtctcactatgttgcccaggctggccttggattcctggcctcaagtagtcttcctccctcagccttccaaagtgcaggaattataggcatgagccactgtgcctagccaatgaactgatgttgacacatattattaactagagtcttgaaagaatagtgacatagagacttggagaagatagcttcccattaaatcttattaaatagataaagaaaaagttttcaaatatttacaaaatagtgtcaaaagttaaatctatacttattttgtattttgtcatcattttttggtctaagtatatgtgctaagaatgacaaagaatttccctataatattgagagatctgctttattagtccagggattgcttatttctatgcttgtgatacagaaaaccacaattgttagaatatttctaattacgaaattgtctttcacttacagctttaaacttgtgtgacagtggaagctgactgtacctttaaacttgtgaggaatgcccggtacatattagatgtccaatatatataatcttttattgagttaaataatgaattgaattaataattaataattcattatggtatcactgatttgactccaactaactcaccagtcaaaagaattgtgtatatttctttataattaggaatatagtaaaatatatttttcattgtgaactatatgttaaaataaaattgtcatcacgattaacttttaaaacacaaatctgaatttgccacattagtagagaactgactattctacctacaatcttgtcatatgaacttagcacactagttaaagaaaacacaagtgtaaccttctatataatatatatccttttaaaataaaacccttatcctgcagagtaatgaaattttttgacttaaaaactatctgaaaatttcttatataggaaacagggaaacaataaaattagtgataagaacaaattaggaataacaggaggaatcatacttatctcttcttcaaaaaaaaaagataattcaaggaggaagagaatacaacatatgcttggcaacaatacttacaacattggtcaaattctctaggcactagcatgaaaaggaaagaaattgtgtggcatgcttttgaaacaagatgggaaggttataaaagtctttagaaatccaccttaggtcagatagcttctagcttaattattctgagttcttcaaggatgatgtaaaaacactcatgctctgatctggcatggaactttgggtaatgcttcaatttgttaaaaataaatttaagttttgcattaaggttttcctcagtgcttttcaggaacttatttcccatgtcattgttcaggttggcacttacacagtttactaccgaagaaatggttgtactcttttaccccaaaggaaagttacaacatgacagatgttgggatggtatatgatgtataaaattcttaatagttcccattgtgcagaatacttataacctttgctccaaatcaatacaaatttatgtttataataccttatatctaaatttgaaaaagtaacagtgaaggaatgaatgaatacaaactcttaccacttggcaataccatgactggctctgtaaacctttgttcatctgctaatggtaggtttaaggagatgattaacaccattcccagactggttccaacgaacagacaaggagagatggtagagtcatttttccgtgcaaaggagtccatgaagtatagtgctgtaattgcttctttagaatctttgtcaatactggagatactagagcttctagaacgattataggaattttctcggttttctatggaaataaataaaaaaaaccacacaaattgttagtatatttccacaataacatcagatttaatatatataaatcaaaattatgaggaggaagtaaaatttcattgtttgttaattgacctgagagggagcttatccagttcaccagcttattttgaagatggagaaactgaagtctagaagtataattcataagcttaggcagacctaggactagaattggaggctcctgagctccagctcaccatttttctttctctacgttaactcacaagtttgttgaaattcttttacctagagaaaagatttagtctaaatagtaatggttacaagaatttctgacatcacttaaattgtgcttccctcctacctctgaattgttggaagaatccctaacagtttcttgtcagttccaatgacaatactgtggcgattggcatgaaagggcttatcaggatcacaaatcttctgcggcaaacatattctatatctggggtaattacaattctaaaaattaacatttctaccaaggccaaaatgcaaattttatctccctgaactggtttcaggctgttacctttaattcaaatgcagtcctaactttgcctagggctaaacaaagagtacagactatatgccatcctgttgatagtggtaatctttctgagagtgcttcagctcacttaaaaaaaaaaacaggatggtttcaggttctcctctcatcaacacttgtacatgtgcacgctccaataagcataaactcatacagctcagtgaaatgttatcaaggttgtcctgctcttataatctctccagagtacaagttcttcagatttttctttctacagccttcactctcttttccctcttgataggtacacatgtaactcataattgtttttatagaaagaggataaatacaggctcctcagacttttttctaggaaacaaaatatagtattcctaatttctcctttttatctcttagcaaatttataaaaataattgtttgtcataaaatttagagatgagagggagcttggaggttatatgttttacagatttggagacaaacttagagtttagtaattttcccagaatccaggacaaattagaggtagaagtatctaaaattcaaaattcccacctctcattacagtgattgagagtgctacttctggctggttgtggtggctaatgcctgtctgtaaccccagtgcttgaggccaggagttcaagactaccctgggcaacttagtgagacactgtctctacaaaaactgaaaaataagctggatgtggtggtgtgcacctgtacctccagctgcttgggaggctgaggcaggagcatcacttaagttcaggagttagaggctgcagtgcactatgattatgccactgtaatccaacctcagcaacagaatgagatcctaactctttaaaaaataaaaattaaaagggggctacttcttttataatcattacatattgcttcttttataacatgctagatattatatggctccaaatcttttccattcatggttcatcaccatacaaagttgatactcacagacacctgttagagaaataacatcattatctgcatatctaagggatcagatttagtatagcataatatttaaaaaaccaaaaacttaaatataatttttttaaatttgaagaccaatatagatcactgtcaaaagttttcaggagtagtaaatagagacttacttcacagcatagaattactatagcaaatcttcctaaaattatttttttcctatctctttctctaaagttccttatcaataagacagttgcagcaaagttacaaaattccctttttttgcctctgtaaaaatttctggtctctggctcttgtaatttactcccctaccccaccgccccacactcattccataaataagcaaatagaccttccttttaaaaatatatgaagatgaaaattgcaaactttagaatttaatatcttgcctttgttcttggtcacattcatttgacaattgaggaaattaaggttgcaatacattaaatatctacagatagagacaccaaaaagcttaccattgggattgaaataaactcttaattattatgggaagggtagggaacagatttaggcataggtctccctttgtacagaggagggggtagttacctataagcagaggcattctggttttagaggtgaggaaggaggtggagtgaggaatggagttggagttatggccacagccccatcaggctctcaggtattcactgattagtagttttttaacatctttcatatgtgatctccatcccatatctctgttcccattaccattgtaaaccaaattttaactgtaacaaaaaaatttaatatgtttaacataccttctgttgtaactggtaaagaaatctccatgcaggctgctgactgggcctttcgaaatggtggtcttccaggaccccagcgatttacttttgaaacatcggcactagaaagacgttttccagaactgcaactctgagaagttggacttgtgcagtgtccatttacatggtctgtgccaagaggaggaaggcagcatacatataatgattaactcttaatacaaaggaatacaagcgtgtagattaacaaatgaagatgagcaacaattcctttattttctaaaccacatgaatatagttaagtccttgttcttttaagacttagtcataattttagtagttagccaaaaatttcaaaagatatttattaagtataagattcatttttttatattttggctgtgtaacatagattaaaattggttctatatctctaccatgtattctgtcattatagtattaaactttttgttgcataacttaaatatacaatgaaagtactttaagtgcttggagtttaaaaagatagaatagaagcattttaaaaaaaattttactttaagttctgggatacatgtgcagaatgtgcaggtttgttacataggtatacatgcaccatggtggtttgctgtacctataaacctgtcttctaggttttaacccccacatgcattaggtatttgtcctaatactctccctcccctttccccccaccccccgacaggcctcggtgtgtgatgttcccctccctgtgaccatgtgttttcattgtttaactcccacttatgaatgagaacatgtggtgtttggttttctgttcctgtgttagtttgctgagaatgatggtttccagcttcatccatttccctgcaaaggacatgaactcattcttttttatgtctgcatagtattccatgctgtatatgtgccacatttctttatccagtctatcattgatgggtatttgggttggttccaagtctttgctattgtaaatagtgcttcaataaacatatgtgtgcatgtgtctttatagtagaaagatttataatcctttgggtatataccccataatgggattgctgggtcaaatggtatttctggttctagatccttgaggaatcgccacactgtttccacaatggttgaactaatttacactcccaccaacagtgtaaaagttttctatttctccacattctctccagcatctgttgtttcctgactttttaatgattgccattctaactggcctgagatggtatctcattgtggttttgatttgcatttctctaatgaccagtgatgatgagcttttttcatatgttttttggccacttcttttgagaagtgtctgttcacagctttgcccactttttgatggggctgttttattcttgtaaatttgtctaagttccttgtagattctagatattagccctttgtcaggtggatagattgcaaaaattttctcctactctgtatgttgcctgttcactctgacaatagtttcttttgctgtgcagaagctctttagtttaattagatcacatttgtcaatgttggcttttgttgcaattgcttttggtgttgtagtcacgaaatctttgtccatgcctatgtcctgaatggaagttctggccagggcaatcaggaaagagaaagaaataaagggtattcaaataggaaaagagaaagccaaattgtctctgcttgcagatgacatgattgtatatttagaaaaccctatggtctcagcccaaaatctccttcagctgataagcaacttcggcaaagtctcaggatacaaaatcaatgtgcaaaaatcacaagcaatcctatacaccaataatagacaaacagacagccaaatcatgagtgaactcccattcacaattgcttcaaagagaataaaatacctaggaatccaacttacaagggacgtgaaggaccacttcaatgagaactacaaactactgctcaaagaaataaaagaggacacaaacaaatggaaaaacattccatgctcatggataggaagaatcaatatcgtgaaaatggccatactgcccaaagctatttatagattcaatgctattcccatcaagctactttcttcacagaattagaaaaaaagctactttaagtttcatatggaaccaaaaaagagcccatatagccaagacaatcctaagccaaaagaacaaagctggaggcatcaagctgcctgacttcaaactataccacaaggctatagtaaccaaaacagcatgatactggcaccaaaacagatatatagaccagtggaacacaacagaggcctcagaaataataccacacatctacaaccatctgatctttgacaaagctgacaaaaacaagcaatggggaaagaattccctatttaatcaatggtgctgggaaaaccggctagccgtatacagaaaactgaaactggaccccttccttacaccttatacaaaaattaactccagatggattaaagactcaaacctaaagcctaaaaccataaaaaccctagaagaacagaagcatcttactgtgcagttaagaagggtacataagaacattggttctggggccaggctagactgcctggaatcaaatctcagttctgccacttactagctgtatagattactgaaatcttcatgcattagttgcctcttctgtaaatttggaatattattacctacctaatggagtttttgtgataatacatgtcaaatgctagaatatgtgctggcatacagtaaactcagaacaaaagttaattacgattgtcggtcttgttccagagtataaaactactcacgtccaagataagagtactgtttatttagaccttgtgagtttggctctgttttgatagaacttaaaaacttggcaatgcattaaagtatgtcttatttttcttaatgctaacaaattatatttgaaacatcatctcgtagttcagcaatacatagaatacattttaaaatgtgtttctttggtcatacaaatgaagatagagtgccacagagaaaaatcatgtttattggccatgttgaacatgaagaactagtacttggtatccactacaatatagccttactgtattatagagtttgaaaaggtgtaattgtacatttcctggattcccttgcagatagtgcaaagatgaaaattagttttcaccatttaaatgggctggcatgttaaaaaatgggagttaacatttatcaaacacttaaatgctgggcactttgtacacattacctcatttaaccttcacaacaatcctgcaatgtaggtgtttttttctcttatcctgattttgaagatgaagaaactaaagctcagaaaaaatcagtaagaaaattttctcatatcacatacgtaataatcagaattctaatccagagttgctcacttactgtctgtatgcttaaacatttgactacagggtcaggtaaaatatttcagaaggagtggaaattttgaagacatatttagtagggtttaagaggcacatgtaatgcacactgagatccaggctttttggattctgactataatgtgccttggagaggacattttaaaattaaatctatttggggattattgaactttccatatctgtatgtttatatctgttccaagacttaggaacttttcagttattgtttcattaagttttctttttttggtataaatttaaagggtacaagtgcaattttgttgttacatgaatatattgcatagtgatgaagtctgggcttttagtggaatcacatctgaataagtactctgtacctggtaagtaatttctcctctttcactccccctcccaccctcccaccctcccacccttctgagtcttcaatgtctattattctgcactctatgtccatgtgtacaaattatttagctcccacttataagttagaatatgcagtatttttctatgcctttttccttcttttctctttctgcaacttctaaaatttgattatttgtttgcttgttttccacaactcctaggctttcctaattccttctcattctttcttctttctccctccctcttttcctccctccacaacacccccataccacctttgtctgattgggttatttcaaaagacctggcttcaagttcagaaattctttcttctgcttggcctagtctactgttaaagtactcaattgtatttttttattccattcactgaattcctcagctctaggatttgtttggttcttttttatgatatctatctctttgttgaatttctcattcagctcaggaattgtttttcttatttctttgtatttatctgtatactcttgtatcttgctagatttccttaagatcgttattttaaattccttttcaggcatttcatagatcttttttttcctttggggtctgttattggagaattattgtgttcctttggaggtatcatgttttcttgattttttgtgttcacatgtccttacattgatatttccacagctggtataactgtcacttttcccaattttataaagtagcttccatagagaaatattttttcctgttgatgtatctataatgtaagttgggtacatggctttggctttggttctggatgggcaccatagcgtagtctccatgtgattactttggctgtaatcagtattggagatgtctgcaagttccttagtggcataggctgcagttgtttttggaggctgtggtaaggatttgctggggatggaggtgccaagtgggatggtcctcaggcctcttggtggggtatgtgagcatcagcagtgatggcagtaggccagttcttggttccctggggggcacatgcaggtgtcagtggtggtagtatgggccctgagtaggctggtctttgggcccttgggtggagcacacaggtgctggcaggtgaggtggcctgctccttgagtccctgggtaggatgcatgcattggcactggcagtgtcaatagcaggtgggtcctctggtgcctgagtggagtgcacagagactggtggtgtcatcaggccagtaggaccagtctgcaggccactgggtggcatgcatgggtgccagtagtgagccaaatggcccaatccctaggcctctgggtgtgatatacaggcactagtggtgtccatagtagggcaggcaggctgatccctgctcccctgggtggggcatgtgagtatacagcctctctgatgtgctagatcacctgctccctgggatgtagggtgctgcatggctcaggtgccagaaatgcagttataccactgggtcagctggcatagcaacactacagccttctgggtggatgtggagggatgttggagatgcaggagtcattgggcaccagggcgggatgtagtttggtgtttactctgctctcaaaatggcatcatattgtagcagcttgggtcccagaggtcccagcacgaattccctccctgaaacaatgcagtcttgtggactccaggaagctccttatactaggctcagggcccaagagggccaaagggctttcttatagctaggactgcaggcatttgtggttggaatgtggactgctaggaatctctcacttaccgtttctcctgcattggagcatccctcctaggtgtgagccaatccaactgagtgccttgcttccttttctatgctcccatctcaaacttccatgcctcaaagggtccctgttgttttcttactggattcattaattcttccctagattttctacctgatacattgttacctacttgctgtaggttcctaatatactgagataaaattatttggttaagaaggttaagaacaagttttactcttggatatattaagcaacgtcatgttctagcagtgatctctgggtattgtagtttctacctccaatttacttattcttttaaaaatagctttaatttttaaaattttaacttccttagagtctcacttccatttagacaaaaagttaatattttctttcagtatccttctgcaattagtctaattaatttttttccaacagaaatagaagcatagattgaattcctgctctaagatggctgactagatgcagccaggggaacatctcccaccaagagaccaggatactggggagactggcacactcctatcagatcttcagagggaaggcattgagagcagatggagggaagacacaggggctgggctaaaggagaagaaagctgggaaacctgcattgggctaccacacaccacgacttgttccctgaccccaatgactcctgcaaaaggggtgagttgagcagtcaagaaggaacctgctatcgccatgggcctctggaatcccagcaggaggagaccccttagccacaatggacatctgaattggcagggaaagctgcttagagaagagagaagcattaaggaaagaactccagctagcgcccagagggtttggtgtgggagcacctgtaatggagcagaccagtgatgcccgtcaccctaggctcaacttgctcccataagagctttaaccctagggaaactgtgaggcctgaactctatagggtggtcttgcccatgagacagagccagtctgacctaagcacccctcagtcttctggcctctcccaggcccccagcctggctaagcctgtctgtagtgcagcccctaggtacctcctgggggtccttatcatagctcctgtgctggtggactgtgcctgactggcagagtgctccagcagagtgcccctgcctgcaccacactgagtcctcccccaacagcagcctccatgctgctttgcccacaggcactcacccgtagccacctccacattgctttgccagcacatgtgtgtgcaggtagacatagccttcccttccctgccagcgtaaatatgcatgagcaccctgtcatgacactactgccagtggagtgcaccttgtcccacttctcccagcggtaccaccattgttgttgaagcattggcagtcaaggagcccactggccctgccctgcctgtgccccacctgtgcagcaacactgccactggtgcaaaattaggcacagaaaatagtggccctggccttggcactgggcggccaccactaccagcatgaatatgcacagagggcacacacagcacccaccggtgctcccatgataacaccaccactagcatgaatgcatgcacagttgcctacaggggcccctggtccacactgccccccacgccccagacatactgccactactactgctgtgaatgcctgctcaaaggctggcactctggtacctaccagcaccctgctgcagccaatgagagtctacactgctgcactgctgctgctgctagcatgtgcaaataagaacagaatctgctgccaccaccctacgaagtgctttgtctccatggttggcattacccattggaatgctgtgaccagtggccaggacactctggcccctctagtgcagtagattcctaaactcaaggagctggagatcaaaggcaaggcctgaaaggagtcctcaagagttaaagcttgcagtccaggtgtcctaagctgagccttggtccccaaaaatcttgccataatgaagaaagtagttagctgggcccatattataccacaatcaaacccccaaggtcatcaaatagaataaaagaaaaaaatactcatccaaaggacaacaacttcaaagactgcaagaacatcagcccataaagatgagaaagaactactgcaagaactccgaccactcaaaaagccagtgtcttctttcctccaaattaccacattagttctccagcaagagttcttaactgggctgagatggctgaaatgacagaaatagaattcagaatatggataggaatgaagatcatcaagattcagaagaatgttgaaacccaacctaaaaaagctaagaatcacaataaaataatacaggagcggacagacaaaacagccagtgcaggaaagaatgtaactgagctgatagagctaaaaaacactctacaagaatttcataatgcaatcacaagtattaacaacagaatagactaagctgaggaaagaatttcagagcttgaagtctggctttctgaaataatagagtcagaaaataataaagaaaaaagcatgaaaatgaatgaacaaaacctctgagaaatatgaaattatgcaaagagactgaatctatgactcattggcatttctgaaactgatggagagaatggaagcaacatagaaaacacatttatgatatcatctgtattagtccattctcacactgctatagagacacacctgaggctgggtattttatcaagaaaaggtgtttagttaactcatggttcttcgggctgtacaggcttctgcttctgaggaggcctcaggaaacttacaatcatggtggaaagtgaaggggaagcagtcacatcttcacataggaggaatgggggaggtgctatacactttttttgagacggagtctccctctgttgcccggggtggagtgcagtggtgtaatgtcagctcaccgcaacctctgcctcctgggttcaagtgattctcttgcctcagcctcccaagtagctgggattacaggtgcctgccatcatgcctggctaattttttttgtatttttagtagagacgggtttcaccatgttggccaggttggtcttgaactcctgacctcaagtgatccacctgcctcgacctcccaaagtgctggatttacaaacatgagccactgcgcctagccactacccacttttaaacaagcgtatctcaggagaactctatcacaagaacagcaagagggaagtccacccccattattcaatcactgccgatcaggcccctcctccaacactgggaattacaattcgacatgagatttaggtggggacacagagccaagccatatcatcatctataagaacttacccaacctagctagagaggctaacattcacattcagtaaatgcagagaaacccagcaaagaagaccacaagaagaccatccccaagacacataaccatcagattccccaacatcaaaatgaatgaaactattttaaaggcagctggagagaaaggataggtcacctacaaaaggaagcccatcagactaaagtggatttctcagcagaaaacctacaagccagaatctctagtgaattgcctggtgaaaggcttttctgaagccagtgagtaaggactggaggaagtgactgcagacttcaaggaacatgaaaaaaaaatcaaagaaaaaatcaaagaaccacgacaccaccacaggaacaaaataaacctccagtggccaaccccaaagaaagagacctttaagaaatgtctgacaaagaattcaaaataatcatctttagaatttcagtgacctaagaagaacaaagaagaaagaaaaaactaaacaaaatcaggaaaacaatacctgaaaaaagagatgttcaacaaagggatagaaaccattaaaaaaaaaaagccaaacaggaggattctgagatggaataggaagcaccagaacactctagataacaattgcactgacagaatttgaaagaactactgtggaactctggagtttattgaagacatacaactttcaggggaaggcttagatggtaaattgcagctaattttggtcaattttagctcttagctcagtagtagctacctatgccccactcccaatcccctgccaggcagctgtgcacatgttcctggaacagtttgcatacagctttcaggagacagggtggaccaacaaaacccccctctatccttaaaaaatcagggatttgtgtcctgatcattgatgactgcttctgatcacagaagtgcaaacaaagaactgggcagccattgttgttgcacttaccctcattcccgcaagccctacaccctctgtctgaagtgacttccaagggatttaaagctccactgccactccattaactccttcatttttctctttttcttctttcgagagccagacattaaagaattagacattaagaagacaactgcatatacagggaaaattagaaaatgaccacacatatccagagaaaagctcagaaaaggcttaagaagaccttaagattacaccccagaccagtccttggcacagagacagattacaactataaagcaaattaataaataaaacctaaagcaataacagcaacaaaataaaccctagaaaatggagcaaatatgatttccagagttattacattattaaattaaaaagttcccttttaaacaaaaaaaatcataatgtacacaaagagacagggaaggatggcccattgaaagaaaaaaatagcaacagaaattatccctgaaaaagtcctgagggtagacctactagataaatactttaaaacaactgtcttaatgatgcttaaagaactaaagaaagatggggagaaagtcaagtaaaggatgtatgaacaaaatataaatatcagtaaagagatagaaaacctaaaaagaaaccagaaagaaactctggagcttaaaagtataataaccgaaatgaaacattcactagaagaattcaaaggcagatttgagcagacagaagaattagcaaacttgtagattaaaaagtgaatattatcaagtctgaaaaacagaaagaaaaaaattcaaaatggtgaacagaggctaagtgacatatgcatccccattaagtaaaaagtcaatattgtggaaatttcagaaaaaaaaggaagagagacagaaaggggcagagaaaatatttgaataaataatgactgaaaacttctcaaatttgatgaaacacatgaatataaacaaccaagaagctcaatgaattccaaggaagataaactcaaaaagactcacattgagacattgttacaaagctttcaaaagtcaaagatggctcatgcctataactccagcactttgggaggccaaggcaggaagactgcttgagttccggagtttgagaccatcctgggcaacataggaagacctggtctctacaaaaaaaaaaaaaaaggaaaagcaaaaaaattagccaagtgtggtggcaaatgcctacagtcccagctaatcaggaagctgaggcaagaggatctatttgagtccaggatgttaaggctgctagaagccatgatcaatcaggccactacattctattctgggtgacaaagtgagaacctgtttaaaaaaaaaaaaaaaaaaaaaaaaaaaccaaggagtcgaagacaaagagagaaccttgaaagcagcaatagagaagtgactcatcatatacaaggcatccttaataagataatcagcatatccttgatgctgattatgaaaactttggatggaaagtagaaggcaggaatcaatatatttaaaatgctaagaggaaaaaaaatttcaaccaagagtcctatatctggcaaaagtgtccttcaaaagtaaggaataaattaaaatattaccagataaacaaagctaagggagattgttaccaccagatccgccctgtaagaaatgtgcaaaggagtcctgcagggtgaaataaaaggatattaggtagtaactcaaagccatatgaaggaataaagatctcaataaagacaaatacaagggcaattgtacaagctagtgttattggaacaatggtttgtaaccacaccttttgggttctacataatttaagagataaatatatttaaaggaattattagttcatgttgtggggtacatatggtataaagatgtaattttagaacataaacaactgaaagaagtgagaaagaagctgtaaagtatcagaatttctgtatgctattgaagttaagctggtatcaattcaaatcttagtgttataactttaggatattaaatgtaagccaaatggtaaccataaaattagctataaaatataccaataggaaatgagaaaggaatctaaacatcccatttaacagtcagctaaacacacacaagaccacacacaaacagtaataaaaaaatggagtacaaaaaagctataaggcctatagaagagaaatcataaaataacagaaatccctctttatcagcaattactttaaatgtaagtgaattaaagcctctactcaaaagatagagattgactgaaaggataaaaacacatagtctaaccatacatggtttataacagactcacttttgatacagagtcacaaataaattgaaagtgaaaggatggagaaagagattccatgcaaatggtatccaaaacagagtggggtagccatatcaatatcagacaaaatggtctttaaatttataaagttaaaagagactaagaaggacattatatttcctaaaaagctgaacatattaagaagatacaacaattataaatatttaagcctctaatgagagaccatcaaaatatatgaagcaaaaaatgagagaaaatagaaatatacagttctataatagttgtacaattcaatattccacactgaaaaatagatagaccaaccagacagaagtaagagaaaagaggacttaatacaataaaccaactagatctaacagtgatatataacactctatacatcaacaaaagtatacgcattcttttcaagtgcacatgagacatcctccaggataggccatatgtaagaccataattgaagtcttgatagacttaaaaagatagatgccatacaaagtgtcttctatgagcacagtggaatgaagttagaaatcaataacagaagtacaattgagaaattaacaaacttgtggaaattaaacaacactctcttaaccaatggatcaaggcagaaatcaggatgaaaattagaaaataattagagataaatgaaaacaaaaatacaacataccaaaaacatataagatacagtgaaagcagtgcaaagagggaaatttgtagctataaatacttataataaaaaataagaaaaatctcaaggcaacaacctaactttacaactcaagaaagcagaaaaagaaaaaaagaacccaaagcaagtaacagaaaacataaacattagagcagagattaaaaattagagaatagaaaaaccacagagaaaatcaatgaaatcaaaagttgggtcttcagaaaatcaacaaaattgataaaactttagttacatgtaagaagaaacagagagagaagagtcaaattactaaaatcagaagtgaaaatggggacattattgctgattctacggaaataaaaagaattttaagatagtattatgaacatttgtatgccaacaaattgcataatctagatgaaaaaataattcctgaaacacaaaacttgccatgaccaagtcacaaagaaatacaaaccgtgaatagacttataactagtaaaaagatttaatcagtaacaaaaaaaaatcttctgattaaaaaaaaagaaagaaaaaaagccctgaacctgttggcttcactcgtgtattctgccaaatctttaaagaagaataatatcagtccttgtaaactttttcaaaaattgaagaggaccaatacttctaactcaatctataaggccagcattaccctgttaccaagctagagaaagacactacaactataaactatattgactatattaatattcctcatgaacagtgatgcaaaatactcaatagaatactattaaatagaattcagtagcatattaatggaattatagactataaccaagtggaatatatttctggaatataaggatgatttaacatgtgaaaattaatcattgcaatatattaaggttacaaattaataaaataaatataccaagcagactcagatagagactcaaaaaaagaggggaaaaacccacctgatcatctcaattgagcagaaaaagcatttgatgaaactcaccacccttttataataaaaacactcaacaaattagaaatagaaagaaattatctcaatataataaaagccatatataaaaacaaagattccacaaaaaactgttagagctaataaatacatttagtaaagcagtagaatataaagtcaacacataaaagtcagttgcatttctttatataaacaatcggcaaaggaaattataaaaaatttcatttacaatagcatgaaaaagaataaaatacttaagaattaatttaaccaaggaagtgaaacacttgtataatgatatctataaaacattactgaaaaaattaaagaacatataaacaaaggaaaacatatcccatgttcatggattagaggacttaatattgttaagatgtcaatataaaccaaagtgatctatggattcaatgcaacctctatgaaaatccatttttttttttttgcagatatagaacaacacatccttaacttcatctggaatctcatggccaaatctaatagccaaaataattttgaaagagaagaataaagttggaagatttacaatttctgatttcaaaacttactacacagctgtaataagacattttggtactgttataaggagtgacatatagactattggagtagaatctagatcccataaacaaacactctcacatatggtcaaatcaattttgacaaggatactgagcccattgagttaagaaagaatagtttcttcactaaattgtgcaggtaaaacttgatggtgcaggtaaaacttgattatctcttagaagctacaaagggcaaaagttaatgacattacatttggtaacaatttctaaaatatgatatcaaaggcacaaacaagaaatgaaaaaatagacaactggacttcataaacatttaaaaactgtgtacctcaaatgacactatcaacagagtaaaaaggccacacatagaatggaagaaaatatttgctaatcatatatctggtaagggactattattatctggaatatataaagaactcctaaaactcaacaataacaaaataaactactcaattcaataacgggcaaagataggaggcatagcaagatggcagaatagaaaactccaccaatcatctccccttgaccccagcaaggacaccaagctaacaaatatctacacagaaaaaaaaacccaccttcataagaaccaagaatcaggtgagcactcataacacctggttttaacttcatatcattagaagaggcactaaggagatagaaaaaacagttctgaatcactgatgccacccctccttttggtagtggtgatgtggtgtgtagagtatctgggtgctcagggagggagggagggagaaaacagcaattgtgaggcactgaaatcagtgctgtcctgttagagcagaaaggtaaactaaaccaaactcagctgatgtccatccacagagagagaatttcaaccatccctagccagaggggaactgccaatcccagcagtctgaacttgagtatgtggaaacatcaccaccaagggctacagctctctgtgtctccaaataaatttgaaagacagtgtagggcataaggactacaactcttaggtgagtcctagtgctgaactaggcccagagatagtggactgggtggggcagagtcgggggcaaacaacatattgagacaccagctgggtcagccaagggactgctggtatcacctctcccataaccccaggctgcacagctcatggctccaatagagaccccttctttctgattaaggacaggagagaaaagagtggagaggactttgtcttgcatctaggataccaattcagtcacatcaggatagggcactggtcagagtcttgaggcccctattccaggccgtatctctcagaaaaaatttcttaacatcacctgggccagaaaggaacccagtgctttgaaggaaagaacccagttctggcagcattgatcacctcctaactgtagagcccctaggccctgaataaccagcagcaatatccaggtgcaatgttaagggccttggatgaacccctgagacttgccagtttcaggtgagactcagcacattatcagctgtggtggctatggggcaaaactccttctgcttgagaaaagcagaaggaaatgtaaaggggagtttgtcttgtaccttagatatcagcacagccacagaggaggagagcaccaagcaggctcttggggtccctgattccaggacatgactcttagatggcatttctagacctgtcctgggccagagggtaactcactgccgtgaaggctgagtcccaggccaggcagcattcacaataagctgacttaagtgaccttggaccttattggaatgttagtggtagcatgacagtacttctcatggcctggggtggtggcggctatggggtggagctcctctgcttttaaaaaaggagggaagagtaggaaggactctgtcttgtgttttgagtgccagccctggctcccagacagcacttctggacctacccaggacctagggggccttgccacccttgaagagaaggacacaagcctggctggctttgctacttgcagatcatagagccccaggaccttgagtgaacataggcattagccagggagtaattatagcaggccttgggtgagacccagtgctacactaaatttaggtctgactcatcacaataatagtagtggtggccacaagggtgtcacttcacccccagcttaaggtggcttagaatagagagagagagagactctgtatgtttgggagaaagtaagtaaagaataagagtctctgtcatgtaacccagataattctcccagatttgtccaagactattaaagcagtacttctatgagtctgcaagaactatagcactactgggcttggggtgcccccaaagcagatacagcttagatcacaatacccaagtcctttcaaatatctggaaagcctttcaagaagtatggatacaaataagacccaaccatgaagactaagataaatacctaactcttcaatgcccacacaccaaagaacatctactagcatcaacactatccaggaaaacatgacttcaccaaatgaattaaataaggcaccagagaccaatcctggagaaagagagatatgtgacctttcatatagagaactcaaaatagctgtgttgaggaaactaaaaaaaaaaattcgagataacatagggaaggaattcagaattctatcagataaatttaacaagagattgaaataatcaaaagaatcaagcagaaaatctggagctgaaaaatgcaactggcatactgaagaatgcataagagtgtttacatagaattgatcaagcagaagaaagaattagtgagcctgaagacaggctatttaaaatacataatcagaagagacaaaagaaaagagaataaaaaagaatgaagcatgctacaatatctggaaaatagcctcaaaagggcaaacctaagaaatgtccttaaagggggggtagggaaggagataggagtagaagttttattcaaaggaataataacagagagcttcccaaacctagagaaagatattaatattcaagtaaagaagattatagaacaccaataagatttaactccaagaatactgcctcaaggcatttaataatcaaactcccaaaagtcaaggataaagaaaggactctaaaagtggcaagagaaaagaaacaaataacatacaatggaacttcaaatgctgggcagcagacttttcagtggaaactttacaggataggagaaagtagtatgacatatttaaagtgctgaaggaaaaaccttttaccctagaatagtatatctggtgaaaatatccttgaaacatgcggaactaataaagactttcctagacaaacaaaagctgagggagttcatcaataccagatccatcctacaagaaatgctaaaggaagtgtttcaatcagaaagaaaaggacattaatgagcaatatataaccacctgaaggtacaaaacttactggtaatagtaaatacacagaaaagcataaaatattataacactgtaactgtggtgtgtaaactactcttatcctaagtagaaagactaaatgatgaaacaataaaaaataataactacaacttttcaagacatagtacaataagacataaatagaaacaacaaaaagttaaaaagcaggaggacaaacttaaggtgagtttttattagttttatttttcactgttggtttatgcaaatagtgttgttatcaggttaaatagcgggttataagatagtattcgcatgcctcatggtaatctcaaaccaaaaagcatacaatgaatacacaaaaaataaaaagcaggaaacgaaatcatatcacccaaaaatatcatgttcacttgaggaagacaggaatgaaagaaggaagagaagacacaaaacaaccagaaaacaaataacaaaatgccaggagtaagtccttacttaccaagaattactttgaaagtaaatggattaaactcttcaatcaaaagacacagaatgactgaatggattaaaaaaagatccattgatctgctgcctacaagaaaacacttcacctataaagacacatgttgactaaaaataaaagcatagaaaaagatattctatgccaattgaaaccaaaaaaaggaggagtcactatatttatatcagaaaaaatagatttcaagataaaaactataagaagagaaaagaagatcactataaaataatgaaggggtcaattcagcaagaggatataacaattttaaaatacatatgtacccaatatgggaacacctatatatattatatatattattactatatattatattatatagtaataatatatatattatattatatagtaataatatatatattatattatatagtattatattatatatgtataaccacaaaagactcagaatagtcaaagatatcctaagcaaaaagaaccaaactggaggaatcacattaccagacttcaaattatactacagaggtacaaattatactacagaggtatagttaccaaaatagcatggtactggcataaaaacagacatattgaccaatgggacagaatagagaatccagaaacaaatccacacacctacggtgagctcatttttgacaaaggtgccaagaacatatgctgcagaaaagacagcatcttcaataaatggcactggggaaactggatatccctgtgcaaaacaatgaaaatagacctctacatctcaccatatacaaaaatcaaatcaaaacggattaaagacttaaatataagacctcaaactatgaaactactacaagattggggtatatctctaggacattggtctgggcaaaggcttcttatgcaacaccccacaagcacccccaaagcaaacatgaacaaatgagatcacatcaagttaaaaagctcagcacagcaaaggatacaatcaacaaagtgaagaaacaaaccacagaatgggagaaaatattttcaaactacccctctgataaggaattactaaccaaaatatataaaaagctcaaaacaactctatatgaaaaaaatctaataatctgatcaaaagatgggcaaaatatttgaatagacttttctaaaacatcacgtacaaatggaaaacaggcttatgaaaaggtgctcaacatcaatgatcatcagagaaatgcaaatcaaaactaatgagatatcatctcgcttaagttaaaatggcttatatccaaaagacaggcaataacaaatgctggcaaggatatggagaagagggaagtttcatgcactgttggtgggaatatgaaatagcaaaactgcaaacagtttggaggttcctccaaactaaaaactgagctacttactatatgatccagcaatcctactattgggtacatattcaaaagaaaaaaaatctgtatattgaaaagacatctactatcctatatttggaaaaaacctaagcatccatccatacatgaataaataaacaaaacatgctacatatatgcaatggagtactattcaatcatatcaaagaataaaagcctgtcatttgtaacaagatagatggaactggagattattaagtgaaataagccaggcacaaaaagacaaacattaaatattctcacttatttgtgcgatctaaaaataaaatcaattaaactcatggacagagagagtagaatgcttatatggtttggctctgtgtcaccacccaaatctcatgttgaagtgtaatctcccaggaggtggggcctggtgggaggtgactgaatcatggtggtggtttctaatggtttggcacaatccccctagtgctgcctcatgatagagttctcacaagatctggttgtttaaaaacatgcagcactgccccctttgctctctcttcctccttctctggccatgagaagacatgcctcgcttccccttcactgtccaccatgagtataagttttctgaggcctccccagccatgtggaactgtgagtcaattaaatttattttatctataaattacccagtctcaggtagttctttatagcagtgtgagaatggactaatacgaaaattaccagagggtgagaagggtagtggggggttagggaggtgttgcggatggttaatgggtagaaaaaattagaaagaaagaatcagacctactatttgacagaacaatagggtgactacagtcaataataattgtatcttttaaaacaacttaaagaatgtaattggactgtttgtaactcaaaggataaatgcttgaggggatgcatatcccattgtccattatatggttatttcacattgcatgtaatcaaaacatctcatgtgccccataaatatatacaaccacaatgcacccacaatatttttttaaaataaaagatttttaaaaaagaaaaaaagattttaaaatattgcttttccacttcataaataggtatttgagtgatgatgttatgaagcagcttctctgtagctatattgctgtctgtggttgtggctcttttgtatgcgtgtggaagtgttccatggctgacattttatgctgcatgctctattttggaatatctagtttggagactaagatcaagtatccatcaccatcatagttacagagccttcagcagcagtcttggccagtggctacaacaatgttattctccaagacaaatgatatattcatgacaggcagcaacttctttcagagttgaaatctgcactctgaagcatcagtaaagaacatgttgctatcatagctcatccaggccagagagctcccatagacaaattgaacctgggacccagtctccagtggcaccaagctatgacatcagctaatcaaaaggcatcttgctgtcccatggcatactggttgggttttcaaacattaatgtatgcagaaacactcttcatttgaagtcacatgaacctgctactagcaaaacattgttggaatgccaatccaaaggacaatgaaattaattggcctttaaattaacttgcttatccactattcattttcacacacacataaaaagcgatgctccactacctacaacaattttgttctctaggagggaccacttcacaaaagtagttgcatgatcaattctcaggatcaccagggttagcttccagacaccatctttctgactcatgcaaatgataatgtggtcatgcttgggagcccagtcagtacctgtgattgtgcttctggagtttatgaggttttgctattggctcccattcttcttacagatgtggattttgtgattattcaggccaagggcaatttgggtatgatccctgttccaggcatgacacgtgattggctctaggaaaaactgttgcagagacaaaattcttgctgttttcaaaggtagaaagctgggattgaggcactcctgaaaggctcagactggagaatttgaagactgaccagtcccttgaatgggctctggccagttataccactttttatagtaggttatatcttcttttcatttaaaaatatgctggtccaggttccaagatggccaaataggaacagctctggtctgcagcatccagcgtgattgatacagaagatgggtgatttctgcatttcctactgaggtacttggttcatctcactgggagtggttggacagtgggtgcagcccatggagggtgagctgaagcagggcagggcattgcctcacccgggaagtgcaaggggttggggatttccctttcctagcaaagggaagctgtgacagactgtacctggaaaaatgggatactcccacccaaatactgtacttttcccaaagtcttagcaatgggcagacaaggagactctctcctgtgcctggttcagcaggtcccatgcccacagagccttgctcactgctagcacagcaatctgagattgagctgtgaggtggcagcctggcttggggaggggcatccgccattgctgaggcttcagtaggtaaacagagtggccgggaagctcaaaatgagggagcccaccacagcttagcaaggcctactgcctttagacttctcctctgtgggcagggcttagctgaacaaaaggcagcagacaacttctgcagacttaaatgtccctgtctgatagctctgaagagagcagtgtttctcccagcacggcgtttgaactctgagaacagacaggctgcctcctaagtgtgtcgctgacacctgttcagcctaactggcagacacctcccagtagaggctgacagatacctcagataagtgggtgcccctgtggggcgaagcttccagaggaaggattaggcagcaatatttgctgttctgcagcctccactggtgatacccaggcaaacagggtctcgagtgggcctccagcaaactccaacagaccaccagctgaggaacctgactgttagaaggaaaactaacaaacagaaaggaatagcatcaacatcaacaataagaacatctacaccaaaaccccatctgtaggtcaccaacatcaaagaccaaaggtagataagaccacatagatgaagagaaaccagagcagaaaagctgaaaattcgaaaaatcagagtgcctcttctcctcccaaggattgcagctcctcgccagtaacagaacaaagctggatggagaatgactttaacgagttgacagaagtaggcttcagaaggtcaataataacaaacttctccgagctaaaggagcaggttagaacccatcacaaggaagctaaaaaccttgaaaaaaggttagaagaaatgctaaatagaataaacagaatagagaagaccttaaatgacctcatggagctgaaaaccatggcacgagaaattcgtgatgcatgcacaagattcaatagctgattcgatcaagtggaagaaagggtatcagtgatggaatatcaaattaatgaaataaagtgagaaagcaaggtagagaaaaacgagtaaaaagaaatgaacaaagcctccaagaaatatgggactataggaaaagactaaatctagtttgattggtgtacctgaaagtcatagggagaatggaaccaagttggaaaacactctgcaggatattatccaggagaacttccccaacttagcaaggcaggccaacattcaaattcaggaaatatagagaacactacaaagatactccttgagaagagcaaccccaaggaacataattgtcagattcaccaaagttgaaatgaaggaaaaaatgttaagggcagccagagagaaaggtcgagttacccacaaaagaaagcccatcagactaacagcggatctcttggcagaaaccctacaagccagaagagagtgggagccaatattcaacattcttaaagaattttcaacccagaatttcatatccagccaaactaagcttcataactgaaggagaaataaaatcctttacagacaagcaaatgctgagagattttgtcaccaccaagcctgccttacaagagctcctgaaggaagtactaaacatggaaagaaacaattggtaccagccactgcaaaaacatgccaaattgtaaagatcatagatgctaggaagaaactgcatcaattaacgggcaaaataaccagctaacatcataatgacaggatcaaattcacacataacaatattaaccttaaatgtaaatgggctaaatgtgccaattaagacacagactggcaaattggataaagagtcaagacccatcagtgtgctgtattcaagagccccatctcacatgcaaagacacacataagctaaaaataaagggatagaggaagatctacaaagcacatggagagcaaaaaaaaaaaaaaaaaaaaagcagggttgcaattctagcctctgacaaaagagactttaaaccaacaaagatcaaaagagacaaagaagaccattacataatggcaaagggttcaattcaacaagaagatgtaactatcctaaatatatatgcacccactacaagagcacccagattcatgaagcaagtccttagagatatacaaagagacttaggctcccacacaataataatgggagactttaacaccccactgtcaatattaggcagatcaatgagacagaaggttaacaaggatatccaggacttgaactcagctctgcaacaaacagacctaatagacacctacagaactctccaccccaaatcaacagaatatacatttttctcagcaccacattgcacttattctaaaattgaccacataattggaagtaaagcactcctcagtaaagtaaaagaacagaaatcacaacaaactgtctctcagaccacagtgcaatcaaattagaactcaggattaagaaactcactcaaaactgctcaactatttggaaactgaacaacttgccactgaatgactactgggtaaataacgaattgaaggcagaaataaagatgttctttgaaaccaatgagaacaaagaacaatgtaccagaatctctgggacacatttaaagcagtgtgtagagggaaatgtatagcactaaatgtccacaagagaaagcaggaaagatctaaaattgacaccctaacatcacaattaaaagagctagagaagcaagaggaaacaaattcaaaagctagcagaaggcaggaaataactaagatcagagcagatctgaaagagataaagacacaaaaaacccttcaaaaaattaatgaatccaggagctggttttttgaaaagatcaacaaaattgatagaccactaccaagactaatacagaagaaaagagagaagaatcaaatagatgcaacaaaaaatgataaaagggatatcaccaccgatcccatagaaacacaaactacctttggagaatactataaacacctctatgcaaataaactagaaaatctagaagaaatggataaaatcctggacacacacaccctccaaagactaaaccaggaaaaagttgaatctctgaatagaccaataacaggctctgaaactgatgtgataattaatagcctaccaacgaaaaaaagtccaggaccagacggattcacagacaaattctaccagaggtacaaacaggagctgttaccattccctctgaaactattccaatcaatagaaaaagaggggatcctcccaaactcattttatgaggccaacatcatgctgataccaaagcctggcagagacacaacaaaaaaagagaattttagaccaatatccctgacgaacatggatgcaaaaatcctcaataaaatactggcaaaccgaatccagcaccacatcaaaaagcttatccaacacgatcaggctggcttcctccctgggatgcaatgctggttcaacatacgcaaataaataaacataatccatcacataaacagaacgaatgacaaaaaccacatgattatctcaatagatgcagaaaaggcctttgacaaaactcaacagcccttcatgctaagaactctcaataaactagatattgatggaacgcatctcaaaataataagagctacttatgacaaacccacacccaatatcatactcaatgagcaaaaattggaagcattccctttgaaaaccagcacaagacaaggataccctctctcaccactcctatttaacataatgttggaagttctggccagggcaatcaggcaagagaaagaaataaagggtattcaattaggaaaagaagagtcaaattgtccctgtttgcagatgacatgattgtatatttagaaaaccccattgtctcagcccaaaatctccttatctgataagcaacttcagcaaagtctctggatacaaaatcaatgtacaaaactcacaatcattcctatacagcaataacagacaaacagagagccaaatcatgagtgaattcccatttgcaattgctacaaggagaataaaatacctaggaatccagcttacaagggatgtgaaggacctcttcaaggagaactacaaaccactgctcaatgaaataaagaagacacaatcaaatggaagaacattccatactcatggataggaagaatcaatatcgtgaaaatggccatactgcccaaggtaatttatagattcaatgccatccccatcaagctaccaatgactttcttcacagaattggaaaaaaatactttaaagttcatatggaaccaaaaaagatcctgcattgccaagtcaatcctaagccagaagaacaaagctggaggcatcatgctacctgacttcaaactatactacaaggctacagtaaacaaaacagcatggtactggtaccaaaacagagatatagaccaatggaacagaatagagccctcagaaataacactacacatctacaatcatctgatctttgacaaacctgacaaaaataagaaatggggaaaggattccctatttaataaatggtgctgggaaaactggctagccatctgtaaaaagctgaaactggatcccttacttacaccttatacaaaaattcattcaagatagattaaagacttaaatgttagacctaaaaccataaaagccctagaagaaaacctaggcaataccattcaggacatgggcaaggacttcatgtctaaaacaccaaaagcaatggcaacaaaagccaaaatagacaaatgggatctaattaaactaaagagcttctgcacagcaagagaaactaccatcagagtgaacaggcaccatataaatgggagaaaatttttgcaatctacctatctgacaaagggcttatatccagaatctacaaagaacttaaacaaatttacaagaacaaaacaaacaaccccatcaaaaagtgggcaaaggatatgaacagacacttctcaaaagaagacttctggagagtagtcgttctcccagcacgcagcttgagatttgagaacacacagactgcctcctcaagtgggtccctaacccctgagtagcctaactgggaggcaccccccattaggggcagactgacacctgacacggccgggtactcctctgagacaaaacttccagaggaacaatcaggcagccacatttgctgttcaccaatatccgctgttctgcagcctctgttgctgatacccaggcaaacagggtctggagtggaactcaggcaaactccaacagacctgcagctgagggtcctgactgttagaaggaaaactaacaaacagaaaggacatccacaccaaaactccatctgtacgtcaccatcatcaaagaccaaaggttgataaaaccacaaagatggggaaaaaacagagcagaaaaactggaaattctaaaaaccagagcgcctctcctcctccaaaggaacgtagctcctcaccagcaatggaacaaagctggacagagaatgattttgacgagttgagagaagaaggcttcagatgatcaaactactcagacctaaaggaggaagttcaaacccatggcaaagaagttaaaaaccttgaaaaaagattagatgaatggctactagaataaccaatggagagaagtccttaaaggacctgatggagctgaaaaccatggcatgagaacaacgtgatgaatgcacaagcctcagtagctgattcgatcaactggaagaaagggtatcagtgattgaagatcaaatgaatgaaatgaagtgagaagagaagtttaacgaaaaaaagaataaaaagaaacgaacaaagcctccaagaaatatgggactatgtgaaaataccaaatctacatcagattggtgtacctgaaagtgacggggagaatggaaccaagttggaaaacactctgcagaatattatccaggagaacttccccaatctagcaagacaggccaatattcaaattcaagaaatacagagaacaccacaaagatactcctcgagaagagcaactccaagacacataattgtcagattcaccaaagttgaaatgaaggaaaaaatgttaagggcagccagagacaaaggtcgggttacccacaaagggaagcccatcatactaacagctgatctctcagcacaaactctacaagccagaagagagtggaggccaatattcaacattcttaaaggaaagaattttcaacccagaacttcatatccagccaaactaagcttcataagtgaaggagaaataagatcctttacagacaagtaaatgctgagacattttgtcaccaccaggcctgccctaaaagagctcctgaaggaagcactgaacatggaaaggaataactggtaccagccactgcaaaaacatgccaaattgtaaagaccattgaggctagggagaaactgcatcaactaacaagcaaaataaccagctaacatcacaatgacaggatcaaattcacacataacaatattaaccttaaatgtaaatgggctaaatgctccaaataaaagacacagactggcaaattggataaagagtcaagacccatcagtgtgctgtattcaggaaacccatctcacatgcagagacagacataggctcaaaataaacggatggaggaagatctaccaagcaaatggaaaacaaaaaaaaggcaggggttgcaatcctagtctctgataaaacagactttaaaccaagaaagatctaaagagacaaagaagaccattacataatggtaaagggatcaattcaacaagaagagctaactatcctaaatatatatgcccccaatacaggggtacccagattcataaagcaagtccttagagacctacaaagagacttagactcccacacaataataatgagagactttaacaccccactgtcaacattagaagatcaacgagacagaaagttaacaaggatatccaggaattcaactcagctctacaccaagcagacctaatagacatctacagaactctccaccccaaatcaacagaatatacattcttctcagcaccacaccacacctattccaaaattgaccacatagttggaagtaaagcactcctcagcaaatgtaaaagaacagaaattgtaacaaactgtctctcagaccacagtgcaatcaaactagaacgcaggattaagaaactcactcaaaaccgctcaacttcatggaaactgaacaacctgctcctgaatgactactgggtacataacaaaatgaaggcagaaataaagatgttctttgaaaccaatgagaacaaagacacaacgtaccagaatctccgggacacatttaaagcagtgtgtagagggaaatgtatagcactaaatgcccacaagagaaagcaggaaatatctaaaactgacaccctaacatcacaattaaaagaactagagaagcaagagcaaacacattcaaaagctaacagaatggaagaaataactaacatcagagcagaactgaaggagatagacacacaaaaaacccttcaaaaaatcaatgaatccaggagttggttttttgaaaaggtcaacaaaattgatagactgctagtaagaataataaagaagaaaagagagaagaatcaaatagatgcaataaataatgataaaggggatatcaccgccgatcccacagaagtacaaactaccatcagagaataccataaacacctctaagcaaataaactacaaaatctagaagaaatggataaattcctcgacacatacaccctcccaagactaaaccaggaagaagttgaatctctgaatagaccaataacaggctctgaaattgaggtaataattaatagcttaccaaccaaaaaaagtctaggaccagatggattcacagctgaattctaccagaagtacaaggaggagctgttaccattccttctgaaactattccaataaatagaaaaagaggggatcctccctaactcattttatgaggccagcatcatcctgataccaaagcctgacagagacacaacaaaacaagagaattttagaccaatatccctgatgaacatcgacacaaaaatcctcaataaaatactggcaaaccgaatccagcagcacatcaaaacccttatccaccatggtcaagtggacttcatccctgggacgcaaggctggttcaacatacgcaagtcaataaacataatccagcatataaacagaaccaacgacaaaaaccacatgattatctcaatagatgcagaaaaggcctttgacaaaattcaacaacacaccatgttaaaaactctcaataattaggtactgatgggacatatctcaaaataataagagctatctatgacaaacccacagccaatatcatactgaatgggcaaaaactggaagcattccctgtgaaaactggtacaagacagggatgccctctctcaccactcctattcaacatagtgttggaagttctggccagggcaattaggcaggagaaggaaataaagggtattcaattcggaaaagaggaagtcaaattgtccctgtttgcagatgacatgactgtatatctagaaaaccccatcgtctcaacccaaaatctccttaagctgataagcaacttcagcaaagtctcaggatacaaaatcaatgtgcaaaaatcacaagcattcttatacaccaataacagacaaaaagagagccaaatcatgagtgaactcccattcacaattgcttcaaagagaataaaatacctaggaatccaacttacaagggatgtaaggatctcttcaagaagaactacaaacgactgctcaagaaaataaaagaggatacaaagaaatggaagaacattccatgctcatgggtaggaagaatcaatatcgtgaaaatggccatactgcccaaggtaatttatagattcaatgccatccccatcaagttaccaaatgactttcttcacagaattggaaaaaactactttaaagttcatatggaatgaaaaaagaggccacaagtcaatccaagtcaatcctaagccaagagaacaaagctggaggcatcaagctacctgacttcaaactacactacaaggctacagtaaccaaaacagcatggtactggtaccaaaacagagatatagatcaatggaacagaatagagccctcagaaataatgccacatatctacaactatctgatctttgacaaacctgacaaaaacaagaaatggggaaacgattccctatttaataaatggtgctgggaaaactggctagccatatgtagaaagctgaaactagatcccttccttacaccttatacaaacattaattcaagatggattaaagacttaaatgttagacctaaaaccataaaaaccctaaaagaaaacctaggcaataccattcaggacataggcatgggcaaggacttcatgtctaaaacaccaaaagcaatggcaacagaagccaaaattgacaaatgggatctaattaaactaaagaccttctgcacagcaaaagaaactgccatcagagtgaacaggcaatgtacagaatgggagaaaatttttgcaacctactcatctgacaaagggctaatatccagaatctacaatgaactcaaacaaatttacaagaaaacaacaaacaactccatcaaaaagtgggcaaaggatatgaacagacacttctcaaaagaagacatttatgcagacaaaagacacatacaaaaatgctcatcaccactggccatcagagcaatgcaaatcaaaaccacaatgagataccatctcacaccagttagaatggcaatcattaaaaagtcaggaaacaacagatgctggagaggatgtggagaagtaggaacacttttacactgttggtgggactgtaaactagttcaaccattgtggaagacagtgtggcgattcctcagggatctagtactagaaataccatttgacccagccatcccattactgggtatatacccaaaggattataaataatgctgctataaagacacatgcacatgtatgtttattgcggcactattcataatagcaaagacttggaaccaaccccaatgcccatcagtgatagagtggattaagaaaatgtggcacatatacaccatggaatactatgcaaccataaaaatgatgagttcatgtcctttgtagggacatggatgaagctggaaaccatcattctcagcaaactattgcaaggacaaaaatcaaacactcatgttctcactcataggtgggaattgaacaatgagaacacatggacacaggaagggaaacatcacaccctggggcctgttgtggggtcgggggaggggagagggatagcattaggagatatacctaatgctaaatgatgagttagtgggtgcagcacaccaacgtttcacatgtatacatatgcaacaaacccgcacgttgtgcacacgtaccctaaaacttaaagtataataataataaaataaaaagaaaaaaagaaacaaaactagaagaacaaagactaaatcattaacagtggtactgaagatgagcagtttgggattagggaaggaggcaggtgacatttcctttagatatattgtctgaatttaaaaattactatataaaaaaagaagacttctatgcagccaacagacacatgagaaaatgcttattatcacttgtcatgagagaaatgcaaatcaataccacaatgagataccatctcatgccagttagaatggcagtcattaaaaagtcaggaaacaacagatgctggagaggatgtggagaaataggcacgcttttacactgtttgtgggagtgtaaattagttcaaccattgtggaagacagtgtggtgatccctcaagaatctagaactagaaataccatttgacccagcaatcccattactgggtatatacccaaaggattataaatcatgctactatgaagacatatgcacacgtatgtttattgtggcactattcacaatagcaaatacttggaaacaatccaaatgtccatcgatgataggctgaattaagaaaatgtggcacatatacagcatggaatactatgcagtcataaaaaggatgagttcatgtcctttgcagggacatggatgaagctggaaaccatcattctcagcaaactatcacaaggacaaaaaaccaaacactgcatgttctcactcataggtgggaactgaacaatgagatcacttggatacagggtgaggaacatcacacacggggtcctgtcagggagtggggggctgcgggagggatagcattaggagaaatacctaatgtaaataatgagtcgatgggtgcagcaaaccaacatggcacatgtatacctatgtatcaaacctgcatgttgtgcacatgtaccctagaacttaaagtttaattaaaaaatatgctttctgtacttactttttttatatatacaaaaatgtgtatatatatataatcttatatatataattaaagatcttataatcttatatacatactcttctttgtaattttaaagttttggggtattttaatatttttctaatggtcaccttgaagatgtattcttaattcattactttttaagttatcctctatgtatagtatcaattgatttccctttatgaaaggtgaaattagtataattcctcttccttctacttctctttgctctaaattcaccaccaattaaccaccaaatatagttatagaattattaactcttttattgggtactttaacctcctctttgcctcctatatttcaatttttaaaattacactattgtatttgtattgtcgtggattttaacttcacattctattttacaatcatatttatcaccattgcttaactttagttttacaattaaatgaattaaatagcacctgtcctttaaccatggcctctccatgtatctttttgttggctgaagataatcctgtagcagattttttttgtaagggcttagggggaccaatgttgcacttaatagtattctaatttaattagatcccatttgtcaattttggcttttgttgccattgcttttggtgttttacacacgaagtccttgcccatgcctatgtcctgaatggtaatgcctaggttttcttttagggttttcatggttttaggtctaatgtttaagtctttaatccatcttgaattaatttttgtataaggtgtaaggaagggatccagtttcagctttctacatatggctagccagttttcccagcaccatttattaaatacggaatcctttccccattgcttgtttttctcaggtttgtcaaagatcagatagttgtagatatgtggcgttatttctgagggctctgttgtgttccattgatctatatctctgttttggtaccagtaccatgctgttttggttactgtagctttgtagtatagttagaagtccggtagcttgatgcctccagctttgttcttttggcttaggattgacttggtgatgcaggctcttttttggttccatatgaactttaaagtagttttttccaattttgtgaagaaagtcattggtagcctgatggggatggcattgaatctataaattaccttgggcagtacggccattttcacgatattgattcttcctacccatgagcatggaatgttcttccatttgtttatgtcctcttttatttccttgagcagtgatttgtagttctccttgaagaggtccttcacgtcccttgtaagttggattcctaggtattttattctctttgaagcaattgtgaatgggtgttcactcatgatttggctgtctgtttgtctgttattggtgtataagaatgcttgtgatttttgtacattgattttgtatcctgagactttgctgaagttgcttatcagcttaaggagattttgggctgagacaatggggttttctagatatacagtcatgtcatctgcaaacagggataatttgacttcctcttttccgaaatgaataacctttatttccttctcctgcctaattgccctggccataacttccaacactatgttgaataggagtggtgagagagggcatccctgtaaagagcttctgcacagcaaaagaaactaccatcagagtgaacagccaacctacaaaatgggagaaaattttcgcaacctacccatctgacaaagggctaatatccagaatctacaatgaactcaaacaaatttacaagaaaaaaacaaccccatcaaaaagtgggtgaaggacatgaacagacacttctcaaaagaagacatttatgcagccaaaaaacacaggaaaaaatgctcaccatcactggctatcagagaaatggaaatcaaaaccacaatgagataccatttcacaacagttagaatggcaatcattaaaaagtcaggaaacagcaggtgctggagaggatgtggagaaataggaacacttttacactgttggtgggactgtaaactagttcaaccattgtggaagtcagtgtggcgattcctcagggatctagaactagaaataccatttgacccagcaatcccattactgggtatatacccaaaggactataaatcatgctgctataaagacacatgcacatgtatgtttattgcggcactattcacaatagcaaagacttggaaccaacccaaatgtccaacaatgatagactggattaagaaaatgtggcacatatacaccatggtatactatgcagtcataaaaaatgatgagttcatgtcctttgtagggacatggatgaaattggaaagcatcattctcagtaaactatcacaagaacaaaaaaccaaacactgcatattctcactcataggtggaattgaacaatgagaacacatggacacaggaaggggaacatcacactctggggaccgttgtggggtggggggaggggggaaggatagctgtgggagatatacctaatgctaaatgacgagttaatgggtgcagcacaccaacatggcacatgtatacatatgtaactaacctgcacattgtgcacatgtaccctaaaacttaaagtataataataataaaaaaatagtattctagtataattcctaatgttatgtgccagcccctcaattacatacattcaaggcttgaattctattaatttacttttaggtttttaaattaaaactcctgtttattaggaatgagaaatgtttatgcagttgatccttgaacagcaagggtttgaactgtgcaggttcacttgtctgtgaatatttttctttctttaatttttaattgttgtgggtaaatagtatgtgtatatatttatggggtacatgacatatattgatacaggcatacaatgtataataatcagggtaaatgtgatatctatcacatcaagcaattacccttcctttgtgttacaaaaagtccaattatattatttaagttattctaaaatatgcaataaattattgttgactgtagtcatgttgtgctaggaaatactagtcttattcattttttctattttttatactcattaactatcccacttttcccttcactacccttctcagcctctagtatctctctatgtccacgagttcaactgttttaaattttagttcccacgaataagtgagaacatgttgtttgtctttctgtgtctggcttatttcacttaacataattacccccagttccattcatgttgtaaacaacaggatctctctctttggtgtggttgaatactactccattgtgtatatctaccatattttctttatccattcatccactgatagacacttaaattgcttccaaatcttggctactgtgaatagtgctgcaatatatgggagtgcagatatctcttccatatacaaatttcctttcttctggctatacacttggtagtgggattgctgtatcatatggtagctgcatttttagtattttgaggaacttctaaactgttctccatagtggctgtactaatttacattcccaccaacagtgcttttctacacatccttgtcagcatttgttattccctgtcttttggatataagccatttcaactggcgtgagataatacctcactgtagtttcgatttgcatttctctgaagatcaaggatgtcgagcacctttatgtgcttgttgagcacataaacctgttttccagtcaaaatatgtcttatgttgagaaatgtctactcagattttttgcccattttaaaatcagactattagcttttttcctacagagttgtttgagctccttatatattctggttattaattccttgtcagaggggtagtttgcaaatattttctcccattctgtgggttatctctgcacttagttgattatttcctttcttctgcagaatctttttagcttgatgtaatcccattttttttctattttttatttgaggttaccatgagacttgcaaataatatcttataatccatgattttaaactgttgacaacttaacactgattgcataaacaagctagcaaagagaaaactaataaaaactctacactttaactttgtctccctgctttttaactttttgttgtttctatttatatgttattatactatgacttgaaaagttgttgttattttttattggttcacctgggtctttctacttaatgtatgagcaatttacacaccgcaaacccagtgttataatattctgtgccttcatatacaccatggaatactctgcagccataaaaaggatgagttcatgtcctttgcaggaacatggatgaagttgaaaaccatcattctaagcaaactatcacaagggcagaacaccaaacaccacatgttctcactcaggggtgggagttgaacaatgagaacatatggacatggggcggggaatatcacacaccggggcctgtcggggggtgggaggctgggggaaggatagcattaggagaaacacctaatgtaaatgacgagttgatgggtgcagcaaaccaacttgggcacatgtatacctatggaacaaacctgcatgttgtgcacatgtaccctagaacttaaagtataatttaaaaaaagtaaaaaaaagacattactaccttgaaaaaaataatattccatgcctttctatactttgtcaaagatcatttggttgtaagtatttggctgtatttctggatcctctgttgtgttctattggtctacgtatctacttttataccagtaacatcttgttctggttactacagcattgtagtacaatttgaagtcaggtaatgcgatgcctccagctttattcattttgcttagaattgctttggctatttgggctcttttttggttccatatgaatttttggattttttttctaattttgtgaaaaataatttggtattttgataggaatttcagtgaatatgaagcttcctttgagcaatatgatcatttgtgtgatactgattcttccaatccatgagcatgacacgtatttccatttgtttgtatcatctgtgattcctttcagtggtgttttgtagtcctccttgtagagctctttcacctccccggttaaatgtattcctaggttttttttttttcagctattatataagggactgagttttttatttgattctcagcttggtcgttgttggcatgcagcagagctactgatttgtgtacatggattttgtaacctgagactttactgaattcatttctcaaatctaggagtcttttggagggatctttaggtttttctagttacacaatcatatcgtcggcaaatataaatagtttgacttcctcttttctgatttggaattcctttctttctcttgactgattggcctggctatgacttccagtactatattgaatagaagtggtaaaagtgggcatccttgtcttattccagttcttagggggaatgcttttgacttcttcctattctgtatgatgttggctgtggttttccatatgtagcttttattattttgagatatgttccttctatatctaatttgttgagggttttataaaaggatgctgtattttatccaatgctttttgcatctattgagataatcatatggtttttgtttttaattctgtttacatggtgaatcacatttattgacttgcatatgttgaaccatccctgcatccctgggataatacccacttaatcatagttaattacctttttgatgtgctgttgggtttagtttgctagtattttgttgaagatttctgcatctatgttaatcaggaatattggtctgtcattttgtgtttttttgttttttgtttgttttgttttgtatgccctttcctggctttggtatcaaggtgatactggcttcatagaatgagttaggaaggattccttctttctcagtcttttagaatagtttcagcaaaattggcgccaattctttgaatgtctggtagaatttggctgtgaatttgtatggcccttggctttttttaggaggacaactttgttaaattactgattcaatctcactgcttgttgttggtctgttcagaatttctgtttcattctgattcaagctggggaggtggtatgtttccaggaatttattaattccctatagattttctagtttatgtgcacagaggtgttcatagtagtcttaaataatcttttgtattcctgtggtatcagctgtaatgcctccattttccttccttccttccttctttccttcctctttctttttttctttctctttttctttctctctttctctttctttctttctttctctctttctctctttttttttttttttttgacagaaatgcaacctctgcctcccaggttcagatgattctcctgcttcagtctcccaagtagctgggattacaggcggcaccaccacccccagctaatttttgtatttttagtagagacagggtttcatcatgttggctaggctggtctcaaactcttgacctcaagtgatccacccgcctcagactcccaaagtgctgggattacaggcgtgaaccaccgcacctggccatccattttcatttctaattgagcttgtttgattcttcttttcttggttaatctagctaatagtctaccaattttattttttcaaagaaccaactttttgttttgttgatctattgtattatttttctttgttctaatttcatttagttctgctctgatctttataatttcttttattctggtagctttgggtttggtttgttcttgcttctctggttccttgaggtgtgatgttaggttgccaatttgtttcatttcagactttttgatgtaggcatttagtgctataaactttcatcttagcaccgcttttcctgtatcccagaggttttgataacttgtgtaactattatcattcactttaaagaatttttaaattttcatcttgatttcattttttacccccaaatcatccaggagcagattaatttttaagcatttgtatagttttgagtgttccttttggtgttaattattggttttattccactgtggtctaagaaggtacttgatataatttcaatttttaaaaatttattgagacttgttttgtggactatcatatggtctgttttggagaatgttccatgtgctgaggaaaataatgtatattctgaagctcttgagtaaaatgtcctgtaaattctgttagttatatttgttctagaatgcagtttaagtacaacattttcttgctcactttctgccttgattatctgtctagtgctgtcagcggagtgttgagtcccccacaattattgtgatgatgtctttctcttttcttaggtctggtagtaattttttatgaatctggaagctccatagtaaggagtaagtaatgtatattaaggattgtaatatcttcttgctggggattgattcttttatctttatataatgacttttttttttttttttttttactgttgttgctttaaagtgtctgttctatctaacatgagaataactactcctgctgctttttcttatattggcatggaatatctttttccacccctttacctcgagtttgtaagaatccttgcattagatgagtctcttgaagagagctgatatttggtttgtgatttttaatttttttgtttaacttttattttaagctcaggtgtatatgtgctgatttgttatataagtaaactcatgtcatgggggtttgttgtacagattacttcatcacccaggtactaagcctggtactaaatagttatttcttctgatcctctccctcctcccacccaccaccctcaagtagaccccagtgtctgttttcctctgtgtccacgtgttctcatcatttagctcccacttgtaaatgagaacatgcagtatttggttttctgttcctgcattcgtttgctaaggatgatggcctccagctccatccatgttcctgcaaaggacatgatctcattcttttttatggctgtgtggtattccatggtgtatatgtaccatattttctttattcaatctgccattgatgggcatttaggttgattccatgtctttgctattgtaagtgctgcaatgaatacacacgtgcatgtgtttttatggtagaatgatttctattcctttggatatatacctagtaatgggattgctgagtcagatgttagatgtgttttcagctctttaaggagatgccacactgctttccacaatagtttaatttacactcccaccaacagtgtataagcattcccttttctctgcaaccttgcagcatctgttatttttttttttactttttattaatagccattctgactggtatgagataatatctccttgtggatttttttgtttgtttgtttgtttggttggttggttggctggtttttttgagacagggtcttgctgacgcccaggctggggtgcagtggcacaatcttggtttattgcaatctctgcctactgggctcaagtgatccttccatctcagcctcctgagtagctaggactacaggcatgcaccactgctcccagctaaattttgtagtttttgtagagaagaggttttgtcatgtttcctaggctggtctcaaactattgggctcaagtgatctgcccacctcagcctcccaaactgctgagactacaggcatgagccaccaggcccagcctctcattgtggttttgatttgcatttctctaataaccactgatattgaactttttttcatatgctctttggccacatatatgtcttcttttgaaaagtgtctattcatatcctttaaccacattttaatggggttgtttgcttttgtaatttgcttaagttcttcttagatgctggatattagtcctttgtcagatgcatagtttgaaaatattttctcccattctgtaggctgtctgtttacactgttaattgtttcttttgctgtgcagaagctcttaagtttaattatatcccatttatcactttttgcctttgttgtgattgcttttggtgtctccatcatgaaatctttgccggtttctatgtccagaatgatactgcccagcttgacttccagggtttttatagttttgggttttacatttaagtctttcctccatcttgagtagattttcgtatgtggtgtaaagaagggatccagcttcaatcttctgcatttagctagccagttatgccagcaccatttattgaataaggagtccaaagatcagatggttgtaggtgtgtggccttatttctgggctctctattctgttcaattggtctatgtgtctgtttttgtaccagtcccatgctattttggttactgtagccctgtagtatagtttgaagttgggtaacatgatgcttccagttttgttcttttttgattaaaattgccttggttatttgggctcttttttggttccatatcaattttaaatagtttttttctagttctgtgaagcatgtcattggtagtttgacagtaatgaatctctaaattgcttcaggcaatatggcaattttaatgatattgattcttcctatccatgaacgtggatatttttccatttgtttgtgtcatctctgttttctttaagcagtgttttgtaatttcattgtagagatctttcaccttccttttaagctgtattactaggtattttattctttttgtggcaattgtgaatgggattgtgtttttgatttggctgttggtttggctattgttggtgtatagaaatgctagtaatttttgtacattgattcttgtatcctaaaacattgctgaaggtgtttatcagctgcaggagctttttgtctataactatagggttttctagatataaaatcatgtcatctgcaaacaggaattgtttgactttctctcttcttgtttgaatgctcttcatttctttcttttgcctgattgctctttgccagggcttccaatactctgttaaataggagtggtgggtgagcatacttgtgccagttttcaaggggaatgcttccagcttttgcccattcagtatgatgttggctgtgggtttgtcatagatgacttttattattttgaggtatattccttcattacctagtatgttgagagcttttaacatgaaaggatgttgaactgagatgatcatgtggtttctatctttagctctgtttatgatgaatcacatttattgatttgcatatgtcggacctaccttgcatcccagggataaagcctacttgattgtggtggaatagctttttgatgtgttgctggatttgatttgcaagtatttttttgagatttttgcatcaatgaccatcaaggctattgtcccaaagttttcttttttttttgttgtgttgctggatttgatttgcaagtatttttttgagatttttgcatcaatgaccatcaaggctattgtcccaaagttttcttttttttttgttgtgtccctgccaggttttgatatcaggatgatgctgacctcaaaaaatgagttggagagaaatccctcctcctcaattctttgggatagtttcagctggaatgatacatttcttctttgcatatctggtagaattcagccatgaatccttctggacctggacttttctggttggtaggtgtattagtcagttttcacattgctgataaagacatacccaagactggacaatttacaaaagacagagataattggacttacagttccacatggccggggaagcttcacaatcatggtggaaggcaaaaaggagcaagtcacgtcttacatggatggtggcaggcaaagaaataatgagaaccaagcaaaaggggtttctccttataaaaccatcagatctcatgagactgctccccacgagagcagtatgggggatactgctgccatgattcaattatctcccaccaggtccctcccacaacaatgggaattatgggagatacaattcaagatgagatctgggtggggacacagccaaaccatatcagtaggctattattaacaaactcaattttggagcttgttattggtctgttgagtgaatcaatttcctcctggttcagtcttgggagggtgtctgtgtccagaaatttatccatctcttctaggttttgtaatttctgtgcatagaggtgtttatagtagtccctgctggttacttgtatttctttggggtcagtggtaacctccctttgttgtttgtaattgcatttatttgaatcttctcttttactctttattaccctagttagcagcttatcttatttttttttcaaaaatccagctcctaatttcattgatcttttgaatgttttttttttgtgtgtgtgtcccaatctccttcagttcagctctgattttggttatttcttgtcttctgctttggggttggtttgctcttggtcctctaagtttttttagttgtgacattaggttgttaattagagatctttccaactttttgatgtgggtatttagtgctataaatttccctcttaacactgacttagccgtgtcccagagattctggtatgttgtatctttgttttcatttgtttcaaagaacttcttgatttctgccttaatttcattctgtatattttaagtagagcatttagaccacttacatttaacattactgttgagatgtgaggtactgttccaatcatcatgttgattgctacctagatgctttattttctccatgtgctattattttataggacctgtgagtttaagcctttcaagagtttccattctggtgcatattgacctttggtttcaagattttgcccccttttagcattttttttatagggctggtgtggtagtggcaagttcccacagcctttgcttgtctgaaaaagactttatttctccttcatgtaagcaacttagttttgctggattacaagattcttggctgatgatagttattctgtttaaggaggctaaagataaagcctgaatcccttctggttttcctgtataggttacctgatgcttttttttttcacgttcttatcattctttacttcactttgactttaaatagcttgatgacaaatgccttggtgatgtcctttttgcaatggatctcccaggagttctttgaacttcttgtacttgaatgtttaaatctctagcaaggccagtgaagttttccttaattattcccttagataggttttctagactttttggtttttcttcttcttcagaaacaccagtgatttttaagtttggtcatgggattatgtaatcccatatttcttggagactttgttcatttttttaaacttatttttgttttatttttgtttgattgaattaattcaaaattttgtcttgaagctctgaaattctttcttctacttggtctagtctactgttaaaagtttctgctgcatttcataattccttaaatgtgtctttcatttccagaagttctggtttttttttttttttttgaaaatatctatctctatagaaaagtttttattcatatcctgaattgttatttttaaattttttttcatgttaattttctcctttctcttgtatctcctgaagtaacttaataatcaaccctttgaattctttatctggtgttttaaagatttcatcttggtttggatccattgtggaagacctagtatgatcttttgggggtactacagtatcttgttttgtcatattgccaaaattatttttctggttccttctcatttgggtaaactatttcttttaattatttttggatttatttttaattcatctgtgatttttaaaaatttcttttttttttttgtctcttaaagttgtgactttaatgattacagtttttgtaacctaatttggctctgggcgctttcagaggtgaagactctgtatgagtttcttggttatagaaagtctttgtatgatggctttctcagatgctggttgtggtggcaatgtgcttggtgtgtgagcaggttcactgtctcctgcagggctagaatggcagaagtttctggaagcttatcttgttccccattggtgtgcacttttttatttagttatttttttccccaacattttatttactgggttgaaatgttcaggcttcagtccagtaggggaggtgtctgggggtaaaaaccagatgtagctaaagtatgtgggtagatgcaatacccaatgttggggagagatcacggccttgacaaaggtagctgggagaattctcagtgaaatgcactgtggtcttttcaggaggaagggagagagctacctcagctcctctgccagaccagaaggaaagctactcaactcccagacacactcttcacccagtgtttcacctattcagattagacaggcacctcttttcatctgcaggaattttgatattccaagtagagaggaactatgattctacctttcatgcaagcctgaacttggaggatgctccttctgtggaaaagcagtcaccctgaaatgttccagaaagggtgtctacaggtacactcatgctaagctcccatgggagaagcctcaactgtgtctgcagtggcgagcaagggggagaagtttccatctcaaagatctttcatgagcacccgggctgcctgactgttgggggagagctgcagacttttcttgctgagctcagcactgcaccagtgcctctgctgaaagaaacttcccacatgtggaaagtttggtactcaagacctgccatctggattcttctgtcccacaggatgcctccttaatgttgtgcactccctcttcccctagccgcaggagtccctgaaggccagactactgtgaatgctgctcttctgggtctagctgccctgtggggctgccacgcttcaggatggtagtggggactgtctgcaagggatccaggcacatgacctgtcctcaagtctcccagcagcaggtattagcaccagctctgatggtggtgacaggcgagtgatatagattctgtgagattccttggttataaataggcttactgtgttggctttctcaaatgccagctgtagtagtaatgaacgggtcatgtgaacagactcaggatctctccgttggccagggtgatgcaggcaatgttggtagctgaggtcatgcacaagttttctccttcttgggtgctgtgttattctgcctgcagatgctgttgtgggctgtgttagttggtctccagccagggggtagcatttgcaaagagcaacagctgtggtggtaatggtggtatttgtgcttgtctaatgttagttacccaggggaggtactctgatgtctcaagtgttacccaggaaaggtaccctactgtctcaagcaatgagtggggtcatagaactcccaaaagtttctgtcctttgtgttaagccattagggtgggtagaggagcaaagccaggtggtggctgggtcaggttaagtctgcactctagctctccacatgtgggtgcaagaagcagccccggggaaatcagaaggcagttctctgctgctggggtaatgttccaaggagaagtgtagctgcctctgcttcccagaagaatctgctagggcagtggggagtagcaggcagcagtaagccccatccagctcccacatacttggcaaggcaggtttcacacctacagtgttccactagcagcagctagctaggttctgagcagtctgcactcagaaggcttatgccctatgccataagccttccctgttgagatagaaactgtggctttcaggccatgcccctcccagtctgcccatgaagcagaaatattgtataattattaaaaccctgatgaacattccatttagtgagcatgtatggaagcagaaatattgttccaatattagtgttttgctattcagtagtaaatatttaatatgcaaacagaaatatgtgaaaagcaattgtcttacattaaataagtgtatctttatgtagatttttttcatatgtggtgtgacaagtagtttcttctttaattcggcaagaggaatgtgggggaacagggtcttgctgtgtcacccaggctggagtgcagtggtgcaatatcggctcactgcatcctcctcctcctgggttcaagcaattctcctgcctcagcctcccgtgtaggtggattataggcgcctgccaccatgcctggctaatttttgtgtttttagtagagatgaggtttcaccatgttggtcaggctggtcttgaactcctgacctcaagcaatcctcccgcctcagcctcccaaagcactgggattacaggcatgggccacccgtcccacccctactacattcttgacattctaactgtttgagtatttccatgatagaacctccaaaagtataaaaaaattctaatttgggattgctataattgccacagaatttcctcctattcaagctcaaactacttttctttaccatttattgatttgtctcagttctaacctctggaccaataatgagtaattaactagttcttgctcccacatgccagatcttaaagcacctggagagacttagtggacacctccaggtatccttaggtcagcaggaattgtattttaagaagaattgcaggttatactgacatcaagaggttgacagatggcatttcaaaaagcaatcttttaagtcttcatgagtattaaccaacctacgggacttttacccaggataagaaggtacataagaagtacttcctgaagtgcagctcagattttccatacaagagaagccatattgttcttagttgttgaattagacatagatgtgcatacagatacaaatgtacattatatatataatatatatacatacacacatatgcattatatatatgtgtgtatatatataacttttctgggctttttaaggtgattatgattagttctttttttaagtaattaaaatttttcatcatatttttatattccattttctaatgaggaatagaaggtggtagttacaaggaacagtagtgcccctattaggagaggttagatgcatttttttccctttgtacagctccacacagacactcttgcttttctccatggtaggtttcctagcatttatgaagcgaagcctagtttattttttattttttttttgagacagagtcttgctctagcacccatgctggagtgcagtggtgcgatctcagctcactgcaacctctgcctcctgggttcaagcgattcttctgcctcagcctcctgagtagctgggattacaggcgcatgccaccatgcccggctaagtttttatatttttagtagagacgggctttcactgtgttggtcaggctggtctcgaactcctgacctcaggaaatctacctgcctcggcctcccaaagtgctgagtttacaagcgtgagccaccaggcccagccgtgaagcctagtttttaagaacacaaatgagctggattcaaatcatgactcaaccatctgccctgggctaatagttacttaatttcagaaagattgatgcttcccttcctctgtaaaataaggataacaattgtctgtacttcacaagaatcttgtcaggattaatggaaggaatgtgtgtaaagcccttagcatagtgtatggtatatggcaagcattcaatgttagctattattttcattattaaacttaattggcaagaaaagattgtcattctatagtattccatgtcagaaataatttatctgggcaacatgttctactgaaaatctagtgcctggcattaaacagcacacttgataaagccttcaattgtatataatactgttatttcctttgcacaatagtatgtcctaacaaacttgaattataacgggcttatttattttctctaaaaatctccttaagtcacattgtgcatcctcacattgaatggtctctttaatccttcacaccctgaaaaactgcctgtcttagctcacaaaagtaacacggcaaaaagtaccatatgtaatccagttggagtgagggaatattaccacagcaagtgttagaattataacaatttgatttcttatgctcacggacttgttagattctgggcaaattgtcaggaaatttttgttactttaacatgctgtagcatactttttgaaaatagaaaccaaatcaaaaacaaaagaaagaaaatctgtagaattatacactaaaatgtgaatgttattttacataaattgtactttaataaatatgactaaaaaaagaaacaaaatacataggaaagcatccccacagattgggttaatcacttacctagttacatctatcaacttctgaattaactagtaattgttaagtggtatagcatgagagactaaaaattatgaaaatgagtgaaagtattcactgatggcaaaatacacaataatagtcatctgtaaattctggcctaaagatcagatgatggcctagcctcacaacagcagcagattataaacctttgtgaaagtatttatctctactcctagactcattctttccaaatttatgttcaattatagcattgcagcagagtaatcaacagtttggtggcttaccatagcttatgtgagaatgaggttttatgcttaaccctaaataaaaatagaattgcaggcattacattatggttttgtctaggggacttcgtgtgttttgactgtatcatctttcttcaatcatctgtatattcgtatgtctttctgctgactcctaattcaattcaaagtcaatggatagtgcagcctggttcatcataaggatgttgtattggctacaaataagtctcagtcagatcattggttctacatctgaattaaaattttaggaacaggttaaatcctgaatcaaagtctgcatatggctactactttaatgggagatatcacaaagagataggtcagaagtttctaattcaaagcttctgattaattgcttcttactttgaaatgacagaatttactttttgatttccagtgaagaatttctactttgttatggctaagctacaacgaatatttggaagtccagaatggtcaaagggaccaagctgagtctcttcaggccatggatattcaccactgcttttataataatcactaccatatattattgagcatctatgttctgaacactggcacacaattaagtgtaagaaacctgctaaagttataactgtagaaagtgagagggtaaggtcaaatttttctctaaaattgactccaaagctatgccatttccactaagcaacataatctccttgatacagaagataccacctgtatggtctggatatattctctgaaataaataaatacaacattaaattaaaataaaagttgtttagattaaaatgtttttagtttatgtacttatgaatttatctatttactgattaattagctgactggttggaatacagtaacaaatttcatttgtctctacctttccctaagccagaaactaagataagacaaaaacacctggtatgtatagagacaaagttaaaaacaaaaaagcaagcattctggggtcaccacgccatggtaaagccataaaaagcctacatatctctaattttgttgcaattttccccttttttcccaagatgtggttaagatacaactgggtaaagaggtattttttattagaatttgctccagcatgacaatgtttaatgttgtgacactaccttcatcttaaaatatataatatatttctatttggacaatgttaatgagtccatgactattaatgtcatatagttgttcgatgattataaaacttcatttctgttaagattaatgtctattttgagttataaacttacagtgataactgagtttttcaacccactttttttttttttagtagacataataggaggccaaataatttgggccaaataatcagaggaccttgaagtctgaagacctgaagacttgggttcagactaagccattactagcacagtgaccttgggaaagctatagaatcttttcttagccataatttctccattcatacaaaataagaacaataatagtattacatagatgtaaggattaaagataatacatatgaaaaataccttgtttgctttaaagtactatacaaatgttgattataatttttagtaaaaaaggcttaatatactcaaaaggtgataatgttgttgatttatgaactgtaagaactaaaaattattttgaaaatcagtttttccagaaactttaatggtaaactatattttttctgatgtttcatggaatgtatatttcttaagttctattaaatttctttgttaaaacatttcacagctcagctacttttcattttctcactgtttgaatgtcccataattttaattgtgattattttttgtaattcccaaattaatttttctcatttaattaacgaacactagggaaaaaacaaatataactaacttggaattccacctctactcacttaaatagtctgaactttagttttctcaccagaaaaaggcatatgctggggtgttgtattacataagagaaaaataaaatactgtttgaaaaactgtggataactattatctctatcttccttggctactgactttatttggggactagaacattaatagttcacactttgtggagttgtaaaactggccacagtcattttgcgataatgcctaatttcaggaggctgtgcaacctgtgtttgagtgttttttttctttttaaccctatgagctagcatggggtaaaaaaaagcaaatgtcaaagactgcataaaatttagattataggaccttcctttccatttactgtttttgagagataacattgcctctttgaggcaatcatagttgtttctgatgatagaaaatatttcatggtattatgaagaattacagagaatataaaaaaaatcttactattgtttggatcttaagatttcactgaattctctattgaccgtacccgcgacccccttactttcttagagacctgagaaaactaatcaggtttagagtacaaaaacaacactaccaaaattttgtggaaaatttccaaacatttcacaaaagccttagggattcctaattcatatctcatgaagtgtctctggcgttatatttgcttcagaaaaatttgttttcatacaccatgaaggacttgtgtttccaccacaacaaatgagaataaagttttgagacaagttgtgaagcctagaaaattgtgaagatatgaataacttttgtttgttcataaagagattttcatcttcacctggcaagtgatatacttgattcctctgtctcatagctgatatttcattcctataaaagcctagtgctgactcaggggttctggtagcaagtcctaaaggaagggaatataaaactattggcatggagtaccttagcctaagtgaaccaataatttttatctttaataaagctgaatttcataataactatttggaaagatctgcattttgtatccttatctaaaataaagataaatactgctccaacaaaggactgtttggagggagaagaaaggtttttggagactaaaataggactttaggcacataggaatgcccagaaggagcattcaaactaggctgtaagaccaagctctgacccaatcctgagaacaacagagtttgatactcctttgttagtattttgtgactaacctctatgatattttgataaagatatatatttctatcatcctagccttcatttgaacttgatagcataataaatgtgttgtagattgtgcactgagaattatgaaggtgaatgtctacacaggtagcagcagtgtcaggacctaatgctagtatagaaaaagatattaatccaagtaaagaattagaaaaaaggcatacattcaataggacattagaaaaacaaacaacatttagaaagacacagccccacagttgaaagcttggtaagttttcaattcttcgtccaaataaaaaggatctgttctctttaagaggttgtagtcctgtaccaggtaagtgaagctagggctgattgttagcacctactcaccctcttgggaggtcaagctgtacagtacaagttggtgagaaaaaaaaaggttgtacagcctttaaaaaagtatgaacaatttatataattaaagtttaatgtttatttctgcatttgaagtatgtttattttgttcattagtttatcctcagtgaatagcataatgtctagctgtagaaactggaaattatttgatgtatagttgagtgaatgaatagataatataaagtgttatattatcttggaaactgagaacattggcattccatttgactcaatggattcttcaagctcccaatccctgctcttttctcctgtattatcctcaagaaaatgtttaggtctgaaccctcactctattttatctgtagttcactgtggtataaggaagtttgagacccacatagaaaatcagagttataatctttcactatacacaaaaatgaatgcaagatgggttaaatatttcaatgtaacacctcaaactataagaatcctagaagaaaacctaggaaacaccattgtgaacactggccttgaaaaagaatttatgacttaaatcctcaaaaacaattgcaacaaaaacaaaaattgatgagtgggacctaattaaaaagcttctgcacagcaagagaaacaatcaatagggtggacagacaaactacagaatgggagaaaatatttgtaacctacgcatccaactaagttataatatccagaatctacaaggaagttaaacaattcaacaagcacaaaacaaataactccattaagagtaggcaaaagacatgaacagacacttctcaaaagaagacacaagcagccaacaaacatatcaaaaagtgctcagcatcattaatcattaaagaaatccaaatcaaaaccacactgagataccatcttaaaccagtcagaatagctgttattaaaaagtcaacaaacaacagatgctggtgaagctgcagaggaaagggaacacttatatattgttgatgggaatgtaaattagttctgcccctgaggaaagcagattggagatttctcaaataacttagaactactattcagcctagcaatcccattactgggcatatatccgcaccccctcaaccccccaccccacacacacacacaaaaagaaatagttctaccaaaaagacacatacacatatatgttcattgcaacactatacacaatagaaaagacgtggaattaaccaggtgcccatcaacagtggattggataaagaaaatgtggttcatatacaccatggaatgctatgcagccataaaaaagaaagtcatgtctttttttttttttttttggcacagtttcgctcttgttgcccaggctggagtgcaatggtactatctcagctcaccacaacctccgcctcttgggttcaagtgattctcctgcctcagcctccctagtagctgggattgcaggcatgcaccaccacacctggctaattttttatttttagtagagactgggtttctccatgttggttaggctggtctcaaacccccaacctcaggtgatccgcccatctcggcctcccaaagtgctgagattacaggcgtgagccacggcgcccagccaaaaatcatgtcctttaaagcaacatggatgcagctggatggaagtcattaccctaagcaaattaatgcaggaactgaaaaccagatactgcatgttcttatttgtaagtgagagctaaacattgggtattcatggacataaggatggcaaccatagacactgggggctactagaggggaaaggaaggaagggggacaagagtagggttggtaaactaactgtagggtactatgctcactgccggggtgatgggaagatttgtatctcaaaccttggcttcatgcaatatacccatgtaacaaacctccacttgtaacccctgaatctaaaataaaagttgaaattatattaaaaggagaatatcagagttataaaatgattactggtttctggtttgcctaattcctgacctcctttattcagagacatttgcatcaatcttttcatctgtagcagatttaaaggggtgagagctgagattcccaaacagatacctacaggggaggtaactactgaaaaaatatttttaaaatgtttcatagggcagtgattctcaagtgatctggagaccagaagccttagcatcagccaagagcttgctagaaatacaaaatctcaggccccacctcagatctactgaatcagaatgcagcaattcctacaacagcaagagattacagaatgtagttttaggtgtatgtgtggctattgtatatgtattgtattgaattttggaaataataatgggcacactgtcctttaaatgaccctctaatatagcacaattaattatcattctctttcatggaaaatgaatgaaatcagtaaatattgtgattatttccaatattcttaagtagtaaactccattcgcacttttcccagaaggatgcgtttcacatagtttaacaaatataacatttaatgattacaaaactgttataaggaaaaaaaaatctctcattcctcaattattattacttataatttaaagttgctactaaagaagagtgggacctgtctagtagaccagtatcaagtaaggtattgaagtgacaaatggatcttatcacaatccatcatttctgcctcaagtaacataatacaaaaatagtcaaaattttcctgctttgaaacaatctacttaattgcatgcacagttttctgagtctgctttgaaattaaaaataaagtgtgggccgggcacggtggctcacgcctgtaatcccagcactttgggaggccgaggcgggcagatcaccaggtcaggagatcgagactatcctggctaacacagtgaaaccccgtctctactaaaaatacaaaaaatcagctgggtgtgtgacacgctcctgtagtcccagctacttgggaggctgaggcaggagaatccttgaacctcggaggcagaggttgcagtgagctgagattgcgccactgcactccagcctgggtgacagagcaagactccgtctaaaaaaaaaaaaaaaaaaagtgtggtcgttgtgcgttgtggtggtgttcctaaatctgctgtaacattaacaaaagaagaaacatcataggcaaagggctaaaaacagcatatctaccaaaaactgacagcaattataataattaattatgagttattgaaagccttatcaatgagactgggaacaagaaaaaaagtctacttataccacatctattcaacattgtattgaaggtcctagccaattttttcctttagaaggagaaaatggaggtttcattttcacaaggggcatacttagatacgtagataatccaaaagaattttaccaactataagaattaagaaatagatttagcaagtttcctggatgcaagctcaatatacaaaaattagctgtattttcatattctaaccacaaataattagaaaaagacataaaaataacacaataataggaaaaaaacaaacacaaaggaataaatttaatgaaagatatgcaagacctctacaaaaaaacccaaaaatattaccgaaagaaagtagacacacataaacagagagatactaaacgaaaaattcaatattgttgaatatgttaattctgcccagttgatctatagatccagtgaaatcataataaaaatctaagcatgtttgtgtgtgaactgacaaattctttataaaagttatatgaaaatacaaaaaggtagaacagctataatgatctttaaaaaacttttaaaattattattattatcatgtttaatgagacagggtctcactatgttgcccaggctggtcttcaaactcatggcctcaagtgatcctccccccttggcctcccaaagtgctgggattacaggcatgagccactgtgcctggccagctataacaaaatttgaagttacgtatgtaaatttgataaagggtattgaattatattttatatcgaagatttataagcatgggaaaatatgatcaaagtaatattttaagaatattaattttacaacatgacatgcaacattaattgtaaaaggtgaagagagaaaatacagacatctactagaatatttgtatgataccataggtatgaggcaataaatacctaaattgggttggtgtcaatgagaatgcaaaaggcagggtaaacatatgagacagtctttacaataagatcagtaaaataagaattaaaaatatatgactaagagaaaaatttacataggatataactagattatacatagcctagattcctgaagaataagaataaagaactaaccacttttcagggatggaataaatggaagaaatgctgcaattctaaattaatttctacaagtccaaattcgttgctttataatggcattattaaacttttataaatttgtataaggttcaaattaaaataatgtaaataaaaaggaactacagtttcttgtctgtaagaacagatctatcattcagtaaagacatacctaatgattttggtgtttaaaaactcacacaaaactatatatacattatagaaaaatcagaattatcaaatatgtaaaaattttaaaaaacaggccaaccagtcatattcccaccacccaaaaataactgttaactttttttttaacagacagtaccttaaagatttatccctaggaatctttattctcacattttaaatatattttaatgggtgcacactttgtcttgatgttttgcttcatatcatattctatcatcatttttccttgtgaataaatatacatgtttccaaactgtggtctagaggaatggtatcatttgcttctgcatatatactgtatatttcccactaattcagctctagcctgaagatgacaagtttctctatatcaccaatttttattcaatacttagtaagcattattaatgtatctgcaaaataactttcctttaaaatgtcttttaaagtgttgcacttttacctctgatcttaattttattttgagataaaaatattttaaaagacatttgtttgtatttgatatttggaatcaaatttgcttacagtaaatttaatgaatggaattatacctaattactaaaattataaatttcacattataaagatcatgaaaataaagcaacagattactgcagtgaattaccagaagtctgcaaaataccactcatgtttacctgaggtaggagacttgcagcgctcaagttctaggggaactggactgtcattcagttcagttaaacctgaaaatacaatgaaaaaaaatgagataaattttgctagcattttgtaggttattcttatttcttaattcctacaagtttaaaaggcttttttttatgtgaaaactactttatcatgtccaagttacgtcaattattctgaattttaaaaatatttttattaattttttttttatttttatagagacagggtctcactatgttgcccaggttggtcttgaactcctgggctgaagcaatactcccacctcagcttcccaaagtgttgggattacaggtgtgagccaccatgcctggcctattctgaaaatttgtttaaacaagtgatacaggaaaaaataaggagaagtaactgattgacatgcaagagtatttaaacatggatggtacaaagatataaaatccttttttaactatttttataagaaatagctactttaataaatgacccaattttatctgaaaatagatcataaataagaagaattagaaggggttttaacaatacctaatcaaatattctctcaggagatatgattattggcttttaaaagatctttaaaaactacaaattctaaattttatatttatttataaaaatgtagtattgtatattacatactgtgttttgttcaatagtatcaaattccttataataagcactatatttttctctttccaatatttcttaatttttattctgccacttttctgacaaatgcaacaatagacacaacagattaataaacattttataattctttctacttgccaatctgtatttatatggtatttgtaaaatattcttcattatggtttttctatctttgttagaaagtctcacagactttcttttgtgaaataaatattcataatttctattttaatctgtctccatgctcagaaacatttgagagctattttcaatgaccaaaataatctttgttcctattctttcccatcaccctcttctttatacaatttatagcaataagcttgtggtaggtccaaaaaaaatcacagaattttggaaccaaaaggtgccttgtgacaacctagcccaactcttgtgttttataagtgagaaactataacttcaaagagtttaagctatttattcaaagtcagagaagtaagtcaataacatagcttgaaaaggacacagaactcagattttttattctgcactcatatttcaattgcttatagagcactgaataccaaatgcaaagcttactgtttgctctattttttacttcattgaacattattttcaagactttcaatgtaatgctcatccaattttaaatttctgtttgtaatcatagtacacataatatttactgatataaatattaccattaatctggaaataggcattcatcaaactaaactatgtcgaacacggtcttaaccctagatatacaaattaggaaaaagtttgactaaataagcagtaagtgttaatccacagagttgctataagagttttctaggcactccttgaaagtgtactgacttgaacaggctttgctatctgacagcaaattagaaactgcaagttataaagaggaggaggctgctagaactagaaacattaagaaaagtaacgtggaacaacagtgaaaaaatgggcagagaaaggaactgtaatgactagtgagtgagagatctgggaccatttaacaggtgggtgttttacagatctctgaaaggttttaaagacatcactgtaagttgagtcagtgaatcaaatttattgaatgcctactgtgccacacgctctttgtagtaatagtaataacagcaactagtatctattattttgtacctaatcctccgctaaatactttatataaattatcgttttcccacctaccaatataattagaggggttataatattaaccccatcatacagataagaaaacaggggaagaaaggctattacatcaattctccaaagttaaacagctaggaggaaggatgggatttggtcactataagatagtaagtaagaaagcatgatgtatatgttagaaagagtttcatcaaaattttaaaatacaaaatttggtggttaaagagctaagctcatttgtctggaaaataccatcttttctatttctgtactgtctattgattctgtcattttccctagctccttctgaatttacctactttcctgatgaaggtaggaactgaactgaatatggatctaacaataatagtaaaactacttccttgtgccaatttacaacgtgtcaaaaccctaaacaattttataattatcatcattaaatactatatagttattcagaacaatcattatttaaaaataaacattttttggactatagaagtaaagttttgtccctctagaaaacttggaagatacagaaaagtgatggagaggattaaaaaatacacaatttcatcataattttggcttttttcttcctttttttttttttgagacagagtctcactatcgcccaggctggaatgaattggtgcaatctcggctcactgcaacctccgcctcctgggtctcaatcagttctcctgcctcagcctctcaagtagctgggattacaggtgtgtgccaccaagcccagctaatttttatatttttagtagagacagggtttcatcatattggccaggctggtctcgaactcctgacctcaagtgatctgcctgcctcagcctcccaaagtgctgggattataagcatgagccatcacgcctggccccttccatgatgatttttaatccaataaagagtttcatattctgatttttttttactttgatgagcttctttttttaattattattattatactttaagttttagggtacatgtgtacaatgtgaaggttagttacatatgtatacatgtgccatgctggtatgctgcacccattaacttgtcatttagcattaggtatatctcctaatgctatccctcccccctccccaccccacaacagtccccagagtgtgatgttccccttcctgtgtccatgtgttctcatttttcaattcccacctatgagtgagaatatgtagtgtttggttttttgtccttgcgatagtttgctgagaatgatggtttccagcttcatccatgtccctacaaaggacatgaactcatccatttttatggctgcatagtattccatggtgtatatgtgccacattttcttaatccagtctatcattgatggacatttgggttggttccaagtctttgctattgtgaatagtgctgcagtaaacatacgtgtgcatgtgtctttatagcagcatgatttataatcctttgggtatatacccagtaatgggatggctgggtcaaaaggtatttctagttctagatccctgaggaatcaccacactgacttccacaatggttgaactagtttacagtcccaccaacagtgtaaaagtgttcctatttctccacatcctctccagcacctgttgtttcctgactttttaatgattgccattctaacgggtgtgagatggtatctcattgtggttttgatttgcatttctctgatggccagtaatgatgagcattttttcatgtgtcttttggctgtgtaaatgtcttcttttgagaagtgtctgttcatatcctttgcccattttttgatggggttgtttgtttttttcttgtaaacttgtttgagttcattgtagattctggatattagccctttgtcagatgagtaggttgcaaaaattttctcccattttgtaggttgcctgttcactctgatggtagtttcttttgctgtgcagaagctctttagtttacgcttacgctctccctctccctctccctctccctctccctctccctctccctccacggtctccctctgatgccgagccaaagctggacggtactgctgccatctcggctcactgcaacctccctgcctgattctcctgcctcagcctgccgagtgcctgcgattgcaggcgcgcgccgccacgcctgactggttttcgttttttttttggtggagacggggtttcgctgtgttggccgggctggtctccagctcctaaccgcgagtgatccgccagcctcggcctcccgaggtgccgggattgcagatggagtctcgttcactcagtgctcaatggtgtccaggctggagtgcagcggcgtgatctcggctcgctacaaccacctcccagccgcctgccttggcctcccaaagagccgagattgcagcctctgcccggccgccaccccgtctgggaagtgaggagcgtctctgcttggccacccatcgtctgggatatgaggagcccctctgcctggctgcccagtctggaaagtgaggagcgtctctgcccggccgccatcccatctaggaagcgaggagcgcctcttccccgccgccatcccatctaggaagtgaggagcgtctctgcctggccgcccatcgtctgagatgtggggagcacctctgccccaccgccctgtctgggatgtgaggagcgcttctgctgggccgcaaccctgtctgggaggtgaggagcgtctctgcccggccgctccgtctgagaagtgaggaaaccctctgcctggcaaccgccccgtctgagaagtgaggagcccctccgtccggcaaccaccccatctgggaagtgaggagcgtctccgcccggcagccaccccgtccgggagggaggtggggggggtcagccccccgcccggccagccgccccgtccgggaggtgaggggctcctctgcccggctgcccctactgggaagtgaggagcccctctgcccggccagccgccccgtccgggagggaggcgggggggggggtcggccagccgccccgtccgggagggaggtgggggggtcagccccccgcccggccggccgccccgtccgggagtgaggggctcctctgcccggccgcccctactgggaagtgaggagcccctctgcccggccagtcgccccgtccaggagggaggtgggggggtcagccccccgcccggccagccgcccagtccgggagggaggtggggggtcagccccccgcccggccagccgcccagtccgggagggaggtggggggtcagccccccgcccggccagccgccccgtccaggaggtgaggggcgcctctgcccagccgcccctactgggaagtgaggagcccctctgcccggccagccgccccgtccaggagggaggtggggggggtcagccccccttccggccggccgccccgtccgggaggtgaggggcgcctctgcccggccgcccctactgggaagtgaggacccctctgcctggccagccgccccgtccgggagggtggtgggggggtcagccccccgcccggccagccgccccatccgggaggtgaggggcgcttctgcccggccgcccctactgggaagtgaggagcccctctgcccggccatgaccccgtctgggaggtgtgcccagcggctcattggtgatgggccatgatgacaatggcggttttgtggaatagaaaggcgggaagggtggggaaagaattgagaaatcggatgtttaccgggtctgtgtggatggaagtagacatgggagacttttcattttgttctgtactaggaaaaattcttctgccttgggatcctgttgatctgtgaccttatccccaaccctgtgctctctgaaacatgtgctgtgtccactcagcgttaaatggattaagggcggtgcaagatgtgctttgttaaacagatgcttgaaggcagcatgctcgttaagagtcatcaccactccctaatctttaagtacccagggacacaaacactgcggaaggccgcagggtcctctgcctaggaaaaccagagacctttgttcacttgtttatctgctgaccttccctccactattgtcctatgaccctgccaaatccccctctgcgagaaacacccaagaatgatcaataaaaaaaaaaaaaaaaaaaaaaaaaaaaaaaagattgacataccttaagtcaaaaacaaaacaaataaaactacatttttctgccataaaaaaaaaaaaaaaaaaaaaaagaagctctttagtttacttagatcccatttgtcaattctggcttttgttgccattgcttttggtgttttagacatgaagtccttgcccatgcctatgtcctgaatggtaatgcctaggttttcttttagggtttttatgcttttaggtctaatgtttaagtctttaatccatcttgaattaatttttatataaggtgtaaggcagggattcagtttcagctttctacatatggctagccagttttcccagcatcatttattaaatagggaatcctttccccattgcttgtttttctcaggtttgtcaaagatcagacagtcgtagatatgcagcgttatttctgagggctctgttctgttccattgatctatatctctgttttggtaccagtaccatgctgttttggttactctagccttgtagtatagtttgaagtccggtagcttgatgcctccagctttgttcttttggcttaggattgacttggtgatgcgggctcttttttggttccatatgaactttaaagtagttttttccaattctgtgaagaaagtcattggtagcttgatggggatggcattgaatctataaattaccttgggcaatatggccattttcacgatattgcttcttcctacccatgaacatggaatgttcttccatttgtttgtatcttcttttatttcattgagcagtggtttgtagttctccttgaagaggtccttcacgtcccttgtaagttggattcctaagtattttattctctttgaagcaattgtgaatgggagttcactcatgatttggctctctgtttgtctgttattgttgtataagaatgcttgtgatttttgtatataacatttatttcataaacaattccaccatttaaaaaatttatcaaatcattataaagatataccacacttttaatttaacattcctccattgtgaaacatttggattttccaatctttactatactaaataaagccacaataaatacctatatgtcaaaatctttgatttgtttgtgtttttcctttaaatacttccatagtctttccactatggtaatgacaggggctgtctattttgcattctccgtagcaacttacgggagttccaattgctcaatatctccaccaacactaggtaatagtctcttaaaatcttagtccttctggtcatagtagtatcttattatgattttaaatttctctgatgactatggatagttggaacattttcacatgcttattggctaatcatatatcttcatgattctatccaaatttctggcttattttttatgttggactgcttatatttgtgttatgtagtagtaagaattcttcatatgttttaggtaagaattattagtcaaaaataggcattgtgaatattttctttcagtatgtgatttatcttttaatttgcttaatggtgtctttttttttttgagacagagtcttgctctgttgcccaggctggagtgcagtggtgcgatcttggctcactgcaaccttcacctcccagcttcaagtgattctcctgcttcagcctcccaagtagctgggattacaggtgtgggccaccatgcctggctaattttggtatttttagtagagacatggtttcaccatgttggccaggctggtctcaaactcctgacctccagtggtctacctgccttggcctcccaaggtgctaggattacaggcataagccaccatgcctggcctcttttgtttttgaggcggagtctccctctgtcacccaggctggagtgcagtggcacgatttcggctcactacaagctctgcctcctgggttcatgccactctcctgcctcagccttcggaatagagtagctgggactacaggtgtccgccaccatgcctggctaatttcttgtacttttagtagagacggggtttcaccgtgttagccaggatagtctcaatctcctgacctcgtgatccacccgcctcggcctcccaaagtgatgggagtacaggcgtgagccactgtgcccagcccatgcctggcctcttaatagtgccttttgatgagcagaaatttaatttacttgaagaaaaatttattatttttattgtaatttctttttaattcctaagtagtcagtgccaaacctatgatcatgaagatattattctttgttttcttctagaactttaaaaatgattggttgtgacgtgaagtaggaattaaagttcatttttctcctatttgtttgcccagttgttccaccattatttgttaaaaagactttcttcattgatttttattggtgcctttgtcaaaaacaaattggccatacatgtgtggatctattactggactttttattctgtaatgatccatttatttatctttttttcaattaccacactatcataattaatgtggctttaaggcacatcttgaaatcaggtagtgaagttctccaattttgttcttcttttccaagagtattttagttattccagatcctttgcatttctgcataaattttagaatcactttctcaagttctacaaataatatgttagatttttttataggactgtgataaacatatggcttaatttggtagaataaagatcttttaaaaggtgagtcttccaacctgtaaacctggtattcccctccatttaaataattttttaaatgtttctttctgcaatattttggagattttggtatcgaggtcttctacatagcatttttccagtcatctaattcttttttgatcttctgtctagttcttgtatctatttttaaaagtggaactttgaaatttccaacaattattattgactttctctttttgatcatgttaggcattgcttcatgtattttgtaactctgttatttgggacatatatgttttaattattgtctcatcttgattgacacttttatcattataaaaggtcactttttattctagtgacattctgtttgctttaaaatctatttttttaaatggtattagtacagtaactccagttttcttatggctgttgttcatatgatcttttcccattcattttcaacctatttacacctttaaatctaaaatctctctcataaacagcatataggcagatcttgattttttaaaaaaaagtctcacaatctatgtcttttgattggattgtttaatcacttaacatttaatattattgatatagttgggttacacttgtcattttccttttggttttctctgtctcatgtttttttttgatcctctagtcttttactgctttgtttggcattaagtgaatattttcttgtgcagcatttcattcctttgattaatctttcaccatattttctggagttttcctagtggtaaaacttaccgtatacattagaacttactgtatatatccaatcagagtctacttcagatgtatactgacttaattccagtgagatacagaaatgttaatttttaatagctgtattctctcttatgtgctgttattggtatacaaattaaatctatatattttacaaaccaataaaacattataattactactttatataattttatttcttttataaaagctaagaaataagaagaacaagcatatatttataaccttctgatttaccatttaccattttttattctctttatttgttctggtgaatccaggctatcatctggaataatctgtttactgaaacagaactttgctcccacccacttcctttatgctcttactgacaaatgtatttaatttctatgttatagatccccaaataacaattatatatatgttgttttataaattgctttaaaaatcagctgagagaagaaatatgcatttatactctttcataattacatagttaccttaacaatgctctttgttcctttgtgtagatttaaattacaatctaggttcactttctttcagcctgaaaaacttcccgtagtatttcttgtaaggtggctctgctagtaataaattctctcagtttttgtttacctgacaatgtctatttcacctacatttttgaaaaatacttttgctggatatgaggtttttttaaaaatttaattttattttaagttctgggatacatgtgtaggacgtgcaggtttcttacataggtaaacgtttgccacggtggtttgctgcacttatcaacccatcacctaggcattaagccccacatgcattagttatttatcctgatgctctccctccccctgctccaacaacaggccccagtgtgttgttcccctctggatataagtttcttgaatgacagttttttcgtttgaccaatttgaatatgtcatcccattcccttctggcctccattgtttctgatgagctgttaatcttgtaagagttccatgtatgtgacaagtcatttttctcttattgctttcaagattttctttttgttttttgccttgtagcgtgtttcagcatgtttactatgatgcatctggttgtagatatttttccatttatcttctcggagttcatggagcttcttggatgtgtaattaatgtttttcataaaatttgggaagttttcagtcattatttcttcaaatatttttctcctttcttctctaactctcctctccttctgctaatcctattatgtatatgttggtgcacttaattgtgtcccatgtttctctgagactttatttttcttcatatttttttctctctgtccttcagaatgcactgtctctattaacctattttcaagtttactggttgttatttttgctagttcaaatctactgttgagtcccactactgaatttttcttttcacttactgtacctttcaactccagaatttccatttggttctttttgtaacttctatttctttatttatgttcttgatttgatgagacattgtcatcatagcttcctttacttctttaagcatagtgtcttccagttctttaagcatatttataatggttgttttgaggtcttggtctgttcaatccaacatctgggccttctcacaggaaatttttgttgctttttttccctgtgaatgagccacactttgtttctttgcaagtctcatgatattttgttgagaactggatattttaggtaatatattgtatcacttctgggtactgacgactgattcctctctcccctctccagtttttgctgtttgcttatttatttattcagtgactcggctagactattttcatgaggtttatttcctctacattgtgaagactttgaggttgcttctcagaaggcacagtattcagtgtatatagtcactctgggatggcagtgattttagcaggattctctttaactatctccttcatctctctgttaacctgtctgcctctgttaatatcatatacagctgttacactgccaaatcacagctgggtaattggtctattattttattgtttttcaagcttagcatccaccagatgttctattatttttgacagtaccctgggacatacattgtacagtattctgatctaatttaatttgataaggggtcatttttcaggctagtctttgaggtttaaatcccaggaaggctcttcttagcagtctcgttcattggttctcactggtctagtctgttgcccctaattaagaggtgctatcaattacttcctcttatttcattatcaccaaatttcccattggtcttgagagcacacttaggcttgaactttcccacactgtttcatataaggctagtcactttggggagggctttgaagctctctattcacgtagaccgcatttctttcctgggcaaaacctttgagccactagtctgggccttgggcaaaggtggtatcctctggtcttctcagcttatcttttcaagcataaaacttctgccctatgagcaagatggggtaagggcaatcagggattcaatattttatggtactgaggtctatgcctggggtagagcttctgtcctgtcattggggaatggtcagaagggagcctctgacctcttggtaacacttcccaggaatttggtctcttcaacttggagttggaggggatgagaaatgctggcaacctggaagggggagaggaattaagtgagttgtggttcaagtgccacagactctcattgtttctaccaagtttcagtagattttcttgaataaatatgtcttcatttgctatatgcccttacgacaatttctggagactttacatggttgtttttaaaatagctttcataaattatgctcttccactcaggaataagtctatgatactcctcaggctgccagctggaagtctatcctgtacatggtatttttttaaagttcattttcaaattgtttgctgttatttatatagaaatataattaattgttgtctactgacatgtgttcttcagtcttgctaaattcacttattatttttgtagtttcctttgggttttctacatacaccatcataccattggcaagtaaagacagttttaaattttctttctaatctttaggcatataattttttaatcttgctttttgtccttactaggttatgaactaaatgttgaataaaagtgatgatagtaaacatcctcccctggttactgattctacaaaaaaaagtcagtatttcacaatcaagtatgatgctgtagatttttcttagtacggtttattctattgaggaaatattcttctattcttgttttgttaaggatttttattttaaaatatctaattttatcaaatgttttcacatgtattgatatgactgtattattttctcctttcttatgttaatcagtattttacattcattgattttcaaattttaaacttgcattcctgggataaatccaccttggttatgatgctttatctttcttttatatgtttgtcttccatttgctaatattttatatctgatttttgcatctagttccataaatgagactgacttgtacttttattgtactgcctttgtcaagttttagttatcaacattgtgctggtttcagacaaacagttggaaagatttccttcttcttttatttcctggaagaatttgcataagattggtgttacttcttccttaaatgtttgatagcattaacaagtgcagccacctgtggcttgtagttttctttgttgtgggtatttaattttgaattaaaaaatgttaatgatatgggttacttatattttccaatgtgtttggtgttacatttggtgagttttgtctttcaaggaatctcttaatttcatctaaattgtcaatttctgggaatagagttaataatcttactttatttctttaatgtctgtagaattcagtgatgcttttttttcactcctggtattaattatgtttcttctttctggatcagtattgttagggttttatatagtatttttgaagaactgttttggggttttgttgatctactctggtttgacctctatttcgttcatttttgatgattattatttcctttacattgggtggtttacattgctcttactttttaatgtcttaatcaagagctttagatcatgaagtagagatttaaaaaaaaatctaacataacatctaatgttctaaattttcctctaagcactccttcagtaatatctcataaatttggatatgttgtgtttgtactttcactcagttcaaaaatattttaaaatttcctttgtaatttcttttttaagctatgagttatttagagatgagttgcttaattttcaagtattagggaattttatacatactgttgattcctaatttaattccttttgtggccagagaacacattctatttaatttcaattatttgtaatttattataacttgttttatcgcccagtctatccttgtgaatgttacgtgtttacatgaaaataatttgtattttcaattgcattgtgtaggtgtgtatgttattagatcaatctggccaagagagttgctttagttttttataatcttaccaatttttgtctatttgttctgtcagttacaaaagagaaatgatgaatttccagcaatgatggtagaattgtctatttctagttttgacagtttttgcttcatatattttgaatagttcttattaggtttatgcaagtatgtaggatttttatatcattctggtcatttattttattaatttgaactgtttatctccttgccttgaagtctacttcatctaatattaatatagccatatcagcttttttggggatagtgttttcatggaattcttttccccttctttaactttcaacgtattttttttttttatactttaagttttagggtacatgtgcacaatgtgcaggtttgttacatatgtatacatgtgccatgtttgtgtgctgcacccattaactcatcatttaacattaggtatatctcctaatgctatccctccccactccccccaccccacaacaggccccggggtgtgatgttccccttcctgtgtccatgtgttctcatttttcaattcccacctatgagtgagaatatgtagtgtttggttttttgtccttgcgatagtttgctgagaatgatggtttccagcttcatccatgtccctacaaaggacatgaactcatccatttttatggctgcatagtattccatggtgtatatgtgccacattttcttaatccagtctattattgatggacatttgggttggttccaagtctttgctattgtgaatagtgctgcagtaaacatacgtgtgcatgtgtctttatagcagcatgatttataatcctttgggtatatacccagtaatgggatggctgggtcaaatggtatttctagttctagatccctgaggaatcaccacactgacttccacagtggttgaactagtttacagtcccaccaacactgtaaaagtattcctatttctccacatcctctccagcacctgttgtttcctgactttttaatgattgccattctaactggtgtgagatggtatctcattgtggttttgatttgcatttctctgatggccagtgatgatgagcattttttcatgtgtcttttggctgtgtaaatgtcttcttttgagaagtgtctgttcatatcctttgcccacttgttgatggggttgtttttttcttgtaaatttgtttgagttcattgtagattctggatattagccctttgtcagatgagtagattgcaaaaattttctcccattttgtaggttgcctgttcactctgatggtagtttcttttgctgtgcagaagctctttagcttaattagatcccatttatcaattttggcttttgttgccattgcttttggtgttttacacatgaagtccttgcccatgcctatatcctgaatggtattgcctaggttttcttctagggtttttatggttttaggtctaatgtttaagtctttaatccatcttgaattaatttttgtataaggtgtaaggaagggatccagtttcagctttctacagatggctagccagttttcccagcaccctttattaaatagggaatcctttccccatttcttatttttgtcaggtttgtcaaacatcagatagttgtagacaggtggcattatttttgagggttctgttctgttccattggtctatatctctggtaccagtaccatgctgtggaaagatctaaaattgacaccctaacatcacaattaaaagaacaagagaagcaagagcaaacacattcaaaagctagcagaaggcaagaaataactaagatcagagcagaactgaaagagatagagacataaaaaacccttcaaaaaatcagtgaatccaagagctggtttttggaaaagatcaacaatattgatagaccgctagcaagactaataaagaagaaaagagaaaagaatcaaatagacacaataaaaaatgataaaggggatatcaccaccaatcccacagaaatacaaactaccatcagagaatactataaacacctctatgcaaataaactagaaaatctagaagaaatagataaattcctcaacacatacaccctcctaagactaaaccaggaagaagttgaatctctgaatagaccaataataggctctgaaattgaggcaataattaattaccaaccaaaaaaaagtccaggaccagatgtattcacagccgaattctaccagaggtacaaggaggagctggtatcattccttctgaaactattccaatcaatagaaaaagagggaatcctccctaactcattttatgcggccagcatcatcctgataccaaagccgggcagagacacaacaaaaaaagagaattttagaccaatatccctgatgaagatcaatgtaaaaatcctcaataaaatactggcaaaccgaatccagcagtacatcaaaacgcttatccaccatagtcaagtgggcttcatccctgggatgcaaggctggttcaacatacgcaaatcaataattgtaatccagcatataaacagaaccaatgacaaaaaccacatgattatctcaatagatgcagaaaaggcctttgacaaaattcaacaacgcttcatgctaaaaactctcaataaattaggtattgatgggacatatctcaaaataataagagctatctatgacaaacccacagccaatatcatcctgaatgggcaaaaactggaagcattccctgtgaaaaccggcacaagacagggatgccctctctcaccactcctattcaacatagtgttggaagttctggccagggcaattaggcaggagaaggaaataaagggcattcaattaggaaaagaggaagtcaaattgcccctgtttgcagacgacatgattgtatagctagagaaccccatcatctcagcccaaaatctccttaagctgataaccaacttcagcaaagtctcaggatacaaaatcaacgtgcaaaaatcacaagcattcttatacaccaataacagacaaacagagagccaaatcgagtgaactcccattcacaattgcttcaaagacaataaaatacctaggaatccaacttacaagggatgtgaaggacctctttaaggagaactacaaaccactgctcaacgaaataaaggaggatacaaacaaatggaagaacattccatgctcatgggtaggaagaatcaatatcgtgaaaatggccatactgcccaaggtaatttatagattcaatgccatccccatcaggctaccaatgacttttttcacagaattggaaaaaactactttaaagttcatatggaatcaaaaaagatcccgcattgccaaatcaatcctaagccgaaagaacaaagctggaggcatcacgctacctgacttcgaactatgctacaaggctacagtaatcaacctatttatgtttttataattaacgtgcatcttttataaatagcatatacactgtttttgatatttgtttctttttaatcctgtctcagaagctctttttctttttttggaatgtgtactctatttaatataatctttgatggggttaagtttatgtctatcatctttctaattgttttcagtttgtcccctcagttcttttttttgtttgtttactgttactcttttctgtcttttgagaaaataaaatatacttagtattccattttatcatctctttggcttcttagctacacctctctgttttattttctttaatggttgttctagggattataatgtgcatctgtttgttagattcattacagtccatctttaattattcttacatcacttctcctatgttgaaaaaaacaacagtataattctgtatacttctcttcaatactttgtgttactgttatcatacattttacttctacatgttataaatcccataatacattgttacttctgaaagagtaacacagagtttacggaaagacaaaatacctttttatatttacccacatatttattatttccagtgcttttcattcttacctgtattcctaattttccatcgtttttttatctgctttaaaaattttctttactatttcttatagtacagatctgttaattcatgcactttcatttttgaatgatatttttgctagatatagaattctggattgacagttgtttttctctagcacttaaaagacgtcattatgttgtctctagcttcaattatttctgatggaaaaaatcactcattattcatatttttcccttgtatttgtatgtgtgtgtatgtttctgtactgcttttaagattttctcttgtaggttggttttagtagtttgactataaagtcttaagtgtcgttttctttgtattttttttttttttttttgagatcaggtctctgttgcccaggctggagtgcagtggtgcaatcatggctcactgcaacctctgcctcccagctcaagcaatcctccaacctcagccttgcaagtagctgggaccacagctgcatgcccagctaactttttgtagtttttggtagagacagggttttgccatgttggtccggctggtcttgaactcctgagttcaaatgatccacctgcctcagcttcccaaagtgctgggattacaggcatgaaccaccatgcctggcctttttgtatttttctagtttagggtgttttgagcttcctggatctttaagttgatgtttttcatcaaatttggaaaaaatttcagccaaagtcactgatgttcatttagcttaattattattattattttttaactctgtgcttctgtttggatcatttctagtgacgtgtattcaagttaactgatagttcctagtgctgtgcaatatattgttaaagcaatcatgtgaacttttgtttttgaaaggaatgcctttttattcaaaaagtccaatttaggttccttggtagtaagtataaagggtgccttgacacttccataaagatgtttaaatgttactgtctctgaaaaaacagttttagaatatgaaacctttatcctcaaggtttctatgaatatgaaactcctcaaggaggaaaaacatcaccagcttaattatttctataaaatatcttcctcatttgcttttcatgttgctagtgggaaaagatagtaatactgttttcaaaaaatgacgatgatagatgatttcatgaaacttgcttttgattttttgtctacttaatacctcaattcagaggtcagagatgaatataggattatatattatccttccatgttgatttttacaagatctgctaggagagcaaatacaattgaaaatatgctgttgtgttggtgattgttaccctacactgacttcacaaaggttcttataattaggagaagaaccccaaagacacttaactctacatatataatcaacacatatattcaatggtaaaaaacacacaacatgaaatctaccttctaaacaaatttttcagtgtacattacagtactgtttaccatattcacactgttgcacagcagatatttagaacttgttcatcttgtataactcaaactgtgtatccactgaacagtagctctccatttttccctctccacagatcctggcaatcattattctactttctgcttctgtgagtttgactattttagatatacaccatataagtggaatcatataatatttgtccttctatgactggcttatttcatctagtgtaatgtcctgaaggctcatcatgttgtagcatatgacaagattttctttttctttaaggctaatattccattgtatgtatctaccacattttctttattcattcatctgtctgcagatatttaggttgtgtagaagcttttagtttgatgcggtatcacttacgtatttttgcctttattacctgtgcctttgatgtcacattcaagaattctttgctaagaccaatgttatgaaggttttcacctatattttcttctggaagttttacagttttaggtcttatgtttaatttttaaatgcattttgaatttattgtcacgtattgtgtaagataatacaaatagccaacagttatatgaaaataacatcactaatcaacatcactaattatcagggaaatgcagattgaaactaccatgagatatcacctcatacctgttaggatggccattataaaaaacaaaacaaacaaacaaaaacagaaaataacaagtgttgatgaggatgtggagaaattggaatcattgtgcactattggtgggcatgtaaaatggtacagctgagatggaaaacagcaatgaggttcatcaaaaaataaaaaatagaaccactatatgatccagcaatcctacttctgggtatttatccaaaataattgaaaacaggattctcaaagaaatattagcattctcatgttcaatgcagcattattcattaacagctaagaaacaaccatgaacttttaatttcacatattttatttttaagttctataatttccatttggttctttttcagcgtttcactttctcttctaaaattccccaacatatttactcagccaaaccatcttttcctatatattcttttggcggttgggagcagagtctcactctgtcgcgcaggctgtagtgcagtggcgcgattttggctcactgcaacttccaccttctgggttcaagcaattctcatgcttcagcctcccaagtagctgagactacaggcatgagccaccacacccagctaatttttgtatttttagtagaggcagggtttcaccatgttgtccaggctagtctggacctcctgacctcaggtgatctgcccacctctgcctcccaaagtgctaggattataggcgtgagccaccatgcccagcctcttttcctatatattcttataatagttcttttaaagttcttggcttctaatttcaatttgggtctctatggatctgcttcgactgacttttgtccccccactcaattatgagtcacaattttctgcttctttgcatgttttctaatttctgatggtatgatctgtgtacaacagtagtaaaaactaaagaatcattcatatatgtatattatcactaatatcaggaatatcacacacacacacacacacacacacacacatataatgtagaatcattcggattctgctaagtatttaagctggggctgggctgtagctttaataagattaagttccactgttgtttcaaattggactatgaaaatctctctttatttctcaatccaacactcaatcttttataccccctttgccaagggactgattgttatttgtattggtatttgtgcagtgacacagttgggatgctgtttcagatagttttaattcatcttaattcaacttttggttaaattctataattaccccagaatacagcacattaagactgcataaatttctctgccttccagtccacctgcattgctacttttgcagaaaaattctgagattggtgagggtttagtggcagacaattgccaacttgaatgatttatttttctatttagggttgtttcaaattctttcaaattccaatctataggtcagtccaaacagccattaaacctcactggctattttctattcctttcagtctgtctatctatcaaaagcccactctttcccccacctatacccaggtcagtcactagccccaggtatggaagcagcagtagctttctgctcacctgtgaatggctcttctctgtctggcattcagttaattagacttctttgaatgtatcactcttccatagccccatagaaaaggataattttaattttattgtcattactataggattttgttgttttcatcattgttcctaccatggggattaaggtcttttacatcttttaacatcctatctggaaatggaaagcccctctttcacttatatttgaaatattggaaatactgtgaaagctggattgaagacaggaggaatcagtggaatggaaaccagttaagttggttaatccattactgacattagtaggtattctactaaagtactcagggtacaagtcaaacatcatgcttttgctaatactctaatgagcactaaatgatgaaatttccccaagattttatgtggataaagctgtgtctgacatgtgaatagagtaaagcaaattggctactaaacttgaaggtttttacagtgattcatcagaaagtatgtaataaattctggttggaacagatacagaacttttatggtaaataaacaattgagtatcagaaatatgatttcctggctactgtgaatcacaccaacttttataacttaaaaatatacacctgtgatgtagcttacttggtaatataataagatagtactttaagtaataacttgtaaacatcaaataaaatatcagtattctctaggagacttatacccaatatacaaatatttccatccatatagtctacactttaaaatttttgcttactaaattattatttacaattgtgttctaaatgttttcaatttgatttcacattttggccagataatattttgttgtagaaatacattgtagatgtaggtgtcagtagactatccctactcttcagttgtgacaatcgaaaagttcacagacattgccaaatatccctggggtacaatgttattcctagttgagagactgttttatttgtctgactcacgatgagattactattaactaacgtcaagaaaattcacacatactgctaggtaatatctcccgtattttgtatgtttttgttgatttttgtaaattcaaagatagaaacatattttttcctactaattacaattcaaagtagttgattttcaacataaagctttgtagtaagaaatttacactgtaaaactgattttaagagaaaaaactactaaaatactgaactgaaaatcagatataacaatcacttgtttcatctctcaatgaaacaatgtacttttcaatgtatctcttcattctgtagttctctcatttcttttaaaaaaagtctgtctatactaatagacaaagcctcctattaaatgtcagtccttgtacctgtgctttgattcccattccttctcacttccttaagaatttttttcctttagttatcccctctctcccttatcctcaatctctttttctatggatcattctgtattcacataaattaaaaatatgctcttttctctaaaattaaaaaaaccccaaactactccttttaacatcttactccaatccaggtattaatctatttttcagcaccccttcataaccaaatatctttaaagaggtattcagttgtgctgtttcctcacctgccactcttcagtttaacaatattttggcttctatttcattgcttttctaaaatcgctttttaaagggtcactaacaactttcacagagccagacacactctaatcacttttctgaacctatcctacttagcttatctgtagcatctgatggagtttaccacttcttgaaacattccccaggttttttgttttgttttgttttgttttttcttctgtgaaggtcttttcctttttctcttctccctggcaactcctcttcttcctgaaattaaatgttgaaattcctgatatctctattcacaaatctccttttcttccctactcccttatctctctctcttgctttctctttttctctcttgtcttcttccttctatgcttcctccttcccccacccttcttctaggtaatttcatttattcccatgccattatataccacctatatgctaaagactcaaattattgccctagacctctcatctgatattcagacttacttgtccacttgacatctccatttatacaacagacataataacatttaacgtgtctaaaactgaactctttatttcctaccaccacatgccccctcctatctcaagcttcttcacctttgtaaaaaatatcatgacaataagtggctcaagccaaaatctgggaataatctttgattccactctcttatctctcacattgaatgataatcagtagctctgtaaatgctaatgatttccgaatctatccttttttctccaacagcgttgctatcaccctagtcaagccacttcatttcctgctggagtgcaatactcgccttctaatgggtacaccagcttgctttcctttttggctccacaatattttcttcacacagcagtgtggatatttatagcataaatcaaagcatatcattcccctgcttaaattaaaatataatttcttgtaattacttcagaagcttttatgatcttgtccttactcatctctacaacaaaatcttcactcactttttctcttccgcatgactatgtcagcttccttgcattctttctgtttctagatgatatagttaagtcctttaccatcctagaaccttctattttatttatttatttacttattgaggcagagttttgctcttgttgcccaagctggagtgcaatggcaccatcttggctcacggcaacctccgcctcccgggttcaagtgattctcccgcctcagtctcccaagtagctgggattacaggcacccaccaatacacccggctaattttttgtatttttagtagagacagggtttcgccatattggccaggcttgtcttgaactcctgacctcaggtgatccacccaccttggcctcccaaagtgttgggattgcaggcgtgagccaccgcacctggcctagaaccttcttataagctgttcactctgcttggaatgtgctgttccctgctcttctttgcgttagttcttcttttaaaaaatagccttgttaaggtttaattaatatgtttataaaatgtactatttgaatacattttgacatacgtatacatccataaaaccatctttgcaattaacataataaacacttctgtcatgcccaagagtttctttgtgcccttttgtaaccctctcttccagccctcaccatatgtgtcccttcccattcccaggcaattactaatctgctttctgtcactatgcattgcttttcatttcctggaattctatagaaatggaatcatacagtaatgtgtccttttttttcctgattatttttactcactacaattattttggattcatccatgttgtagtagttatcaatagtatattcttttttattgcggagcagagcaccattgtttggatttgccagaatttgtttatccatttacttaataaaaatttgagttgttttagtgtttaaaatttaaaatttttttttcgttttaataggtttttaggtaacaagtggtgtttatttacatggataagtagtggtgattcctgagattttagtgcacccataaccaagcagtgtgcactgtacccaatgtgtcatcttttatccctcacctacctcccaccctttcccttgagtccctaaagtccactgtatcattcttatgcctttgcagcctcataacttagctcccacttataagtgagaacttacaatgtttggttttccattcctgagttacttcacttagaataatggtctccaactccatccaggttgctgcaaatgccatcatttcattactttttatggctcagtagtattccatgatataccacattttctttatccactcgttgattgatggccatttgggttggttccatattattgcaattgtgaattgtgctgctataaacatgcatgtgcaagtgtctttttcatataatgacttcttttcctctgggtagatacccagtggtgggattgctggatcgaatggtagatctacttttggttctttaaggaatcttcatactgttttccatagtagttgtagtagtttacattcctaccagcagtgtaaaagggttctcttttcactatatccatgctaacatgtattatttttgatttttaaattacggccattcttgcaggagaaagatggtattgcattgtgattttgatttgcatttccctgataattagtgataagcatttttacgtgtttgttggccatttgtatatcttcctttgagaattgtctattcatgtctttaactcactttttgatgggattatttgattttttttctggctgatttgagttcctatagattctagatattagtccttgtcagatgcatagtttgtgaaaattttctcccactctgtgggttgtctgtttactgattatttattttgctgtgaggaagtttttagtttaattaagtcccatctatttatctttgtttttgctgcatttgcttttgggttcttggtcataaagtctatgtttaagccaatgtctagaaaggtttttccaatgttatcttcagaatttctatggtttcaggtcttagatttaagtctttgattcatcctgagttgatttttgtacaagggtagaaatgatgatccagtttcatttttctacatgtggcttgccaattatgccaggatcatttattgaatagggtgtcctttccccactttatattattgttcgctttgttgatgagttggctgcaagtatttggctttatttctgggctctctgttttgttccagtggtctatgtgcctatctttatgtcagtaccatgaagttttggtaacgatagccttgtagtgtagtttgaagtcaagtaacgtgatgcctccagattttttctttttgcttagtcttgctttgacaatgtgggcttttttggtactgtgtgaatgaattttaggattgttttttctagttttgtgaagaataatgatggtattttgatggaaattccattgaatttgtagattgcttttgatagcatggtcattttcacaatattgagtctacccatccatgagcatggcatgtatttccatttgtttgtgttgtccattatttatttcagcagtgttttgtagttttccttgtagagatcgttcacctccttagttaggtaaatttctaagtattttattttattttttttacagctgttgtaaaaggggttgagttcttaatttgattctcagcttggtcactattggtatatagcagtgctattgatttgtgtacattgattttgtatcctgaaactttactaaattcacttttcagatccatgtgctttttggatgtgtctttagggtattctaggcatacaatcttatcattggcaaatagtgacagttggatttcctctttactgattcatatgccctttatttatttctcttgtctggttgctctggctaggacttccagtactatgttgactagaagtggtgaaagtgggcatctttgtttttttctaattctcagaaggaatgttttcagctttcccccattccgtaaaatgttgtctgtacatccgtcatagatggcttttattacccttagttgttttccttctatgctgattttgccgagggttttaatcataaagagatgatgaattttatcaaatgctttttctgcatctattgagatgatcatacgattttaaattttgtttcgtgatgtatcacatttattgacttgtgtatgttaaaccatccctgcatccctggtatgaaacccacttgattgtggtagattatcttcttgatatgctgttagatttggttagctagtattttgttgaggatatttgcacgtacgttcaccagggatatcagtctgtagtcttcttttttgttatgtcccttcttggttttgatattagggtgatactggcttcacagaatgatttggggggaggattccctctttctctatcttttggaatagtttcaataggattggtaccaattcttttttgaatgtctgatagaattcagctgtgaatccatctggtcctggactttttttgttgttggcaattttttaaattaccattttaatctcactgcttgttattggttggttcagagtttctatttcttcctggtttaatccaggagggttgtatatttccaggaatttatccatcttctctaggttttctagtttgtgtgcataaaggtgatgatagtagtcttgaatgaccttttgtatttctgttgtattggttgtaatatttcccatttgtttctaattgagtttatttggatcttctctcttcttttcttggttaatatcattaatattctgtcaattttgttaatcttttcaaagaaccacattttggttcatttatcttttgtattttttgtttgtttcaatttcatttagttctgctctgatctttgttctttctttttttctgctgggtttgggtttgctcttgtttctctggttccttgaggtgtgaccttagattgtctatttgtgctctttcagactttttgatgtaggcattaatgctatgaactctcctcttagcactgcttttgctgtatcccagaggttttgataggttgtgccactattaccactcagttcaaagaatttttaaatttccatcttgatttcattgttgacccaactatcattcaggggcagattatttaatttctatgtatttgcatagttttgagggttccttttggagttgattccactgtgtgaattttattccactgtggtctgagagagtacttgatataattttgacttttaaaaatttattgagacttgttttgtggcctatcatatggtctatcctggttaatgttccatgtgctcatgaatagaatgtatattctgcagttgttgggtagaatgttctgtaaatatctgttaagtccatttgttctagggtatagtttaagtccattgtttctttgttgactttctgtctgaatgacctgtctagtgctgtcagtggagtactgaagtactgcactattattgtgttgttgtttatctcatttcttaggtctagtagtaattgtttcataaatttgggagatcctgtgttagatgcatataaatctagaattgttatattttcccgttggactagtccttttatcatatttaatgtcccttcctgtcttctttaaacaagaagggacattctttaaacaatgtcccttcatgtctttcttaaatattgttgctttaaagtctgttttgtctgatataagaatagctactcctgctcacttttggtgtccatttgcatggaatgtttttctactcctttaccttaagtttatgtgagtccttttgtgttgggggagtctcttgaaggggaacagatacttggctggtgaactgcatgttgtgggagtttggtgtacagattatttagtcacccagtaataagtatagtgcctggtaggtatttttaaaatcctctccccgctctcacactccaccctcaagtaggccccagtgtctgttgttcacttctttttgtccatgtgacataggacctgacaaagatttcatgatgaagatgccaaaagcaattacaacaaaaacaaaaattgacaaataggacctaatcaaactaaatagcttgagcacagctataaaaactatcaacagagtatacagacaaccttcaggataggagaaaatatttgcaaattatgcatccaacaaaggtttaatactcagaatctgtaagaaatgtaaacaaatttgtaacaaaaaaaatgattttattaaaaagtaggcaaaagacataaatagacacctttctaaagaagacacacatgattccaacaagcatatgaaaaaatgctcaacacctccaatcattagaaaaatgcaaatcaaaaccacaatgagataccatctcacaccagtcagaatgtccattattacaaagtcaaaaaataacagatgttggagagactgtggatgaaagagaatgcttatacactgttggtaagagtgtatattagttcagccattgtggaaatcagtgtggcaatttctcaaagaacttaaaacagaattatcactcaacccagcaatcccactattatgtatatacccgaagaaatataacttgtggtttaccataaaaacacatgcatgcgtatgtttactgcagcactattcacaatggcaataacatggaatcagtctaaatgcccatcaacagtagactggattaagaaaatgtcatacatgtacaccatggaacactacacagccataaaaaagaatgaaatcatgtcatttgcagcaacatgaatagagctggaggccattattctaagctaactaatgcaagaacagattcttctttttaaaagctgttttggctactctaaatcctttgaatttctgtatgaactttagaatcagtttgtcagttcctacaagaacatctgctgtatttttattgggatctagcattgaaacaacaaatcgatttggaatgaactgccatcttaataaaattgagttttgtgagacataaacttggtgtaactatttatttaagtcttcttaacttttcttagcaatgttttctggttttccatgtgtgggtctttctttttttttgagatggagtctcgctctgtcactcaggctggagtgcagtggcgcgatctcggctcactgcaacctctgcctcccgggttcaagcaattctcctgcctcagcctcctgagtttctggaattacaggagcccgccaccacgcccagctaatttttgtatttttagtggagacggggtttcaccatgttggtcaggctggtctcgaacccctgacctcgtgatccacccacctcagcctcccaaagtgctgggattacaggcatgagccaccgcgcccggcccatcaatgtgtgggtctttcgtatctgttgtctcatttatggctaagtacttcttatttttgatgatattgtaaatggtaattttaaatttcaatttcagattgttgtatgcatatagaaatacaatggaattttgtatattaaccttatatcctgcacattgttaaactcacatttttagttctagtagctgtttttggcagatttcattaagttttcttcatagacaatcatgtgttctgtgaataaagactatttaccttcttcttcctttccaaatctagataacttttatttcttattcttgcttgacaacattgtctaaaatttccagtacaatgttaaatagaagtggatgtgagttatgaactatttctatttggggtagtggaaatggcactatttcctttatttgagtgttgggcactgtttcctttaatcctttcagatggctctttacctgttcctggatagctgcatcatatgtatacgttgatcagcactttgctctaggaggaaacactgtagatctctgaaattcttttgtgagctgtagatgctttggtttctttggtttctcatcttcatctcccagcctaaaaagctcagtggtttcctcctgggcttcccctccctttgctacagtctagaaattatcttgccatagtaaatgcgtgtgattgttaggtttcccatctgtcccatcattttttttttcattgtttgataccccgtgtcttaaaaaccattgttttcatttattttgtctattttgggggaatgggtgtggggttttcaggcaggaggttaaatctggtacttgctactctatctttctatcttggttggtagtgagaatctaaagctttgactatttatcttgcaaaacttcacttaaatgtttccatgttggataggccattccctgacaacactttcaaaaataggtccaccttatctcatttttccctattattgcattgccacctttcttcaattatctatgactttatttatctgtatattacctgttataaatgaaaggaaaagaccataattgtttcactcatcactatgtacttaatgcctagaaaaatgtttgacacaagagatgctcagtaaaatattatttgaatgaatgttttccccatttattgtttaccataatttttgctgatttttgtttcttaaagcatttcttctttaattttttgtttacttctccattcctgactttctgttcgttttacaatacttatttgcctttcttggatagttctcttatcatccccttttcttttatttcttctttatgtttcaggtgtttttaggatctgttatcatacccctaccctttgaaaagaaagggataataggcctgggactctccaaaggatcccttgttgcataactagaaattgatgcacaagcaatgtagacaattctctacattaagcctatttttcaaacttcccttgattcaaatggcataatatcagtttttaaatagcaaaatttatgtgattatcataagtagaactgttgctaggcaatgaggcagcagcctgagttttagttctacgtattccatagatttcttatgattctggaagttatttaacctctctgtggtgtgggttggttcatcttttataataattataataactaacatttatagaatcacttttattaacattaacccagaaaagttctacaactctctaagggaggtagaaattgcaatttttactttatatattagaagaaagaaactcagagtgattaaatgccttgtttaagattataaatgtatgaagtagctaataaatggaaaaggtaaaacaatgtaaatcttctgatcagatgtccgctgttcttttcaaagcgtttttctgcttctaaaaatcataatctgtagaacacgaaagttttctttcaactacaaaattttattattctatgatgtgaaagttttgccgcttggtaatttaaaaatttggggaggtcagctgtttggagcctaacctatggaataaggtgaccagtaaaagagtcattgatataatttcattgagtgtgcaaaaactgaggtgttttctgattataaaataacggacttggtttccaatgttcctgaaactttaaaaaagacacttagagatccaagattatacagtgaaaagcctatcgagtaattttagtgtcagataggcataagtttgggtcccacttattctgtgtggctttgagagactaatttcatttttttcaacttcaattttctcatgtgtagagaaatatactaatatatatcaatctgcctcaaagggttataatcactagtggataatatatcactgagtcaaactgactagcagagtagaatagataatcaatggaactgggttctattaccccaaatatgaacaatgcatatatgcttttctgaaagttagtaagcaattaatgaaaaggctgagcagtgtctactataataaagtgagactatagaaatataatcagattatattatccaatagttaaacttcaagtcaaattttcattaaatgtattttgaaaagcaattgtaggatatgcctttgagtggttaaagaatcaatcccttttcataatatacaatatcaatcattcagagaagacttttaggaaatctgatttgaaatcctagagcttgtctgagcccttgtggggcccactggtagagacacggggatttctttaagtccttcaacagacttgattttacttctgacttaaaacgttaggtctctagttagaaactatgattacttttgcaaaattctggtgaacctgttacctagttcttctctcatttgtcagatttgaaaagttttctggcagttcatgtgagagaataaagtctgctgccatgctctatcctactgacatcatcatttacatagagatcttgtgacttgtgctagatgcagggaatataaagaattttagatatggtcttgagattcttgtcatgcatttggaaaggcagaacaaaagtataaaagtaagtagccatacaaatgaatctaggctaaatgtcaactaaatggttcaggcaagcctgtactgtgtacaaacctggacactggaagcatttaaataaaggaattggcacaacagggctctgatggtggtaggaaaggcttactatagaaagtaaacttttagcagggcatttccagagagtggataatatgagtaaaacataatggtagtaagatacaaaaatttggcttaagaggagaatagtagaaaatccatttgaggttgttgatagaaattatactttagaggatcctgaatgatgggctgaaaaaaaattctgaaggaaatataaggaatataagaaaatatattattgagatttctcagaacttttaaaaactttacatcatggctgatattataggatcctgatgaactaagagcccgcttctgctcctgaccttcagtctccaatttagcttcttagcataaaataattacaagtttattacagaaaaatcagagtatactgtaaagccaaaagaagtctgtaaaatccacaaagccatgttccagaaacttttctgtctacacacacacacacacacacacacacacacacaaacacacacacaaatgtaggagatcctaccttcagaaggctaaactgggattctgaaatctgaatatgtgtattaaactaccctgagactatttacagaaaggttttggctgaaatcctttatgtggtgcagaggatgggtatgaaaaaatggcacagagcaggaatcagcaaactttaatgtaaagaacaggatagtaaacattttaggccttgtgggcatatagtttttgttgcagctactcaactctgccattgtagtgtgaaagcatttaaggacaatatataatgaatgattgggactatgttccaataaaactttattacagaaactgaaattttataaaattttcagatgtcaagaaatatcacagttatcatagtatcaaataagcttctgttttaggagcagcagaagccaacatagataccaatattctcgcacacagcaacaggaacagagagagtgggaaggattcctaaaagggggtgctctgctagagtagaaaactagagaatatttatgagcaaaaattactcaacttctaggcattcccaggaacattttaaggatttcatagagactgacttttgtaagctaagggcataaaccagtaaagttttaggttttattactgataagattccattagtatctatgaactggtgaggtctgaaggaattcaggttacaaacaacatatatgtgtgagtgtgtgtatataatgtataatgtatatgttatacaactataaggccattttgtatatattgttaaacaacctgctttttaacagaatatattaacatatgataaacattttttatgtcaataaatatttaccgataaaatcactagtctcatctgtacctccagtcacacacactctcactcttcatcctttctataccagtttttataattgcttactctagacatcttcggatctgtgtttgataccatggtaaaggttgatattatttattcgtttactttttaccttaattatcctactttataatgtctgagtgccttaaatcaccatagaaatatgtttgtatattttaataaaaatcatcagaaatcaggaatacttagttatcttcaaggaatataattatttaaaagaagcaaatattgtgaccctggttagaatagtattataaaatggccaaagcataaggttgccaaaataagaaagcattaacttattactgatactggcatgtcagtaataagttttattatttacagggcatcatagctcttcctcctcaaaataaaagacagtgactcttggaatagtaggacatggtctgcatggttggaaataaacactgaaacaatgggtatgattgaatgggtacaggacaaaaatggattgaaatatttctataataatgtttattaaaattatcaggttgcacaccataacaaaacaaaaatttgcatgcatgctgaatgtgttttaagaaacacattactgagcactgatgtatggatttaactcaagcattatgtcttaaaaaggctatttgcctaacctttatataacttactctgataggaagtacggatccgtttcgttaaatcaggataaaagttagacaggccacgcatgcaaaagttgtctttggaacatgccagaccaccagcatcagcagcaggcagaagaaagagaaaaaaaagtctaaagtgaaaggaagtgatatcataccagaatctagaacagccaagatgaagaaattgcagcaagattaggtaattaaattagaaggagatattaataaaataaatcaattataaagtaagaggcgatagatgaatgatgagaatgcggtagtaattttaacatttatttaaatatttaatataaaaatatttataaatatttatttttatcttatttaaatgtcttataaaagtagatggcacattttccttatatgtttttacaaaatacacttctttggcttgtaactaatatgtataaattatttcattaataaaaaatgattgtctttaatccttcagcaattaaaaagaaagctaaagatttcagtctttaatacttcattgttataatataaagtgagttctcactgtgtcatcttgtacactaaacacaaactgagtttataacttcacagattttcctgattttaaagtcatcaatgttctaagctctagtagtaactgttaaggttcaagcagtttaatttaaattaaataataattgtattacctttgtcaaattatgtactttttttgccccactgtgtatatccagcaagtgatttagatattgtcataggattcacagcttttctgattatattggtgcttttagcattgcaaactgaacacctgaaatatggttattatgactgaggaactaaatttttaattataaatagcctactgccccctaacacctttctatcctagagtccatcaacttcaaacttgtctttcctaatcatgaggaaacctcacgttatgtgaatgtacagttgctttttattttgtcttcctttcaaaatctggtagtgatagaggcaaaatctccagaaactgaaatttctagctctcctaaaatattgctaaaagttgagatccctcactaaaaacccttggtttctgaaagagaaattttgtgcccctcaaaagggtctaaactggtaattcagaaatcattgagttttgcaaaagaaaggttaacaagaagagtttcagtataacaagtttcattagtccaaaaaggaaattcatttattatcacatttggatgttaaatttgacatatctgccacttggaaaataacacctaccatcatgtaccttttttattttttattatattttcctatggtcatatttagtaatatcatcaatattcaataaattattttaaataatacaatgtagaaattttattttatttacttattaaaaaatttaaaaagttattattattattattattagagatggggtcacactatgttacgtagactggtcttgaattactggcctcaagaaatcctctcacctcggcctcccaaagtactggaattacaagcataagccaccatatctggcccaaagtagaagactttaaaggactgtctaaaataacacttaatattatagaagcattttcatctgcaaccttttggcctaattttcttttaccaactggactgtcaatggacagaaaatatgcaaaactttggcagtgtttataaagccaactatttggatatatactaaaatttcagtaaaactttggataattggcatatcaaagtttggcattaaatcctaattaccttaagtttattttcttttatagttaaatacatcgatttattgatccttccaagaaaaatgccatctgtcatagtactttaaaaatgttaatgaaaaatgtttattgaattgtgaaaataccttcaggaaggtcatcatccaacaaggaaaggagtcagctacaatatggaattaatttaaaaaattaaaagtagtaaatgacctaaaattatctctttaaagggaccagatattttagaagaaagttaacctgtttgacacaaccattgcaagcagtttttttcaactacagagccctaattttcatagcatttttacatttaatagcttcttattttctgttatttcttaggaattaaacctaagaaagttgagatgcttcctaacttcaatagcaaattgaagtttaaacatacacacccctgaccctttcaaagattctcacaatgtttctgcccaatttattttacttacatgattttgtaaattatgttgattttattttgccatgcatttgaatagtatcagagaagaaagacaagaaatctaaaaataagaacacagatgaccaaatcaagttcataactcatcttgttttatctcctacctgcaatgaactgtttgttttttcgaggagaccgtggttgtcgctggtataagtcacttgatctatataggtcaatggtccccatgcttaacagtactgtcttctgtataaaatccaccacagccaacccattgcagttcccaaatgcaactctaagagagaaaaaaaatacaactagaatgtatcacaacaagcatgattatttttatcttcaaatcaatcataggattattgaaaagtaatgtcttagggttggggaagttgggcagtgatttgtgtaaagtcaagaaggatgccttgcctttatgatggataaactgtcttcgtataataggcatacaatttaccacaaaaaaaggatgatcggcaattatattttgccagcagttttatcatgtaagtcgtgattacccaatccgctctttaaactaggccttatgttttcacagaagaatcacacaaaacctttttgctatgcaagggggagataggttaagaaatgtcactagctaaagatgcttacgtatgtaattagatgcctttttcaaataaaattataactactagactccaaattaattatcttctgaaagagagaaaaataaaaattaacttcatatatcaaaggcattgacactatattagaaatgaggagatacaaaaagttaaatgtttcttacttttgtgctctttattttgtgcccctttcaaaagataaagagaccatttgattaattacttaactaaatctcctgagaaatttaaaaaagacagctcttctaagtaggcattttgattatcttaaccattaggcatacattaactcttatttttctccatttacaatatgccctctagctgaacaattctgtcggtactttttgcttcataaactattaaacattagttatatgaatgttgttttgcttgttttatgtacgttccatgttgtattatttagattgaatcttgtttacaaaccatctgcttactcttaaaatggttctttccacttcactacacaagttaaaacacaacaacaacaacacttctacccatactagatgttttgctaattcacatagagctctacatcttccagtaagacaaactttggaaactgaaaaaaagtattgttatactggtcagatctgggtttaattctcatctctatcacttacaggatatgtgactttgagaaaaattaatgaatcttgcttggccttagcttctttataatgataattacacttctacatttatctggttcacagagcttttatgagtatcaagtcagaaaattatttttaaagtacattgaaatttttccatgcaaaaagaattgatcttaatattataaataaatgcaatattatacatgttaccagttataacaaattagtatccttaaactttttatgttaaaatatagcaaattacttctgcttacagacacgatagagtttctaaatgcaataatgactgaaaaaatgtaggcaactaggatgcatgacattctatataccataaataattatttttgtcttggaattaaaaataagaatactgagaagttatagcttagggctggggaagtcaggcagtagttgtcagaaagttggtaaagagaaaagatttaatctcctattttaaattactagaaaagtgggcaaaaatatattaaacaacagttttcacatattggtcaacaggcaacatagaataagatgagagaaggatagcaaccaaggtaatacatttcacaaatgttctgtgttagtgactgaagatagttcccaggcttgggcacaggaaactagaactcaaagagagattgatggtctcatttagttgaggaggcagagatgagagactgagactacaaaaacagctacaactaataaggcaaaataaactgcacagagagagaataccagagatttgcagaaagatgtccttgagacttcggctgtgtactaatctgtgcatccatgtgcagaagctactcaagacctataaaagagccaccaaaaagataaggcagaacaattcccagagctcacacaaggctaagaatattttatgctactaccaatgaaactgcagagctctcctaatacatggaacagcagatataggagtgtcacttcagcagtgagacaaattagctacagattccaagtaacttaatttcattccaggaaaaagttgaacactactaaaaaaaggcacaaaataccaccaaaaacgtaaaattcacaatatctagtatataaaaagtagcaggcatataaagaatcaggaaaatatgataaccagaggaaaaaatagctcaatagaaacatatccagaaatgaaagagatgataaaactagcagatggaaaataatgaaagtgcttttcaaagcatattacagataatcaagaaggttgaggaaaatacaaatgtgacaaaggaaggaatggaagacataaaaaagccttagagatataaatgtatatgaaatttaaacattatctgcacattagacattatagtagaaaagaatagagaatgctatcctctgaatgtttgtgttttcccaaaattaatacgttaaaacttaacccccaagatgattgtattaagaggtgggaactttggaaggtgactaggtcatgaaaatggagctctcatggataaaattagagcccttataaaagaggccctagagagctgcctcaccccttccattatgtgacgatgaatttagaaggtactatctataaggaacaggttctcaccagacatcaaatctactggtgccttgatattagacttctcagccttcagaattgtgagaaataaatttctgttgtttataagctacccaatttatagtatatttgtttacaacatcccagactaagacagtaaacttgaagaaataacagaaattacctaaaatgaaatgagatctttaaaactttaaaaaacaaaactccataattggagtttcataaaggaagaacaaaagaaaacatatttgaaaaaatgatagccaatttatataaatgacagacaaaatttgaagacagtaataagcctgcagataatagaaacttaaagatcccaagcagaataagaatgaagaaaaacaaaaaggcatcataatcatattgctgaaaacaactaataacaaagagaaaatgttaaaagctggcagataaaaaaatttattacatgtaaaaattaaaatgataaaatcattaaaaaaattagatgaaactatacaaaccaaaagatgatggagtggcatctttgcagtaagaaataaaaataatgtcaacctaaaattgtatacccagcaaatacatctttcaagcagtggaaaagaatttttgcaaaaaaacaaaagctgaaggaattcatcactcacataaatgggttacaaaaataataagggaaatcttagacagaaaaaaatgattccagatggaaatatggatctccactatataatgaagagcaacaaaaatgttaaatatgaaaattaatattaaagacttttctcatttctttaaaggataattgactaaagtaaaattaataacaatgtattatgcggtttataacatatggaagtaaatttatgacaataatgcaaaaaacaggaggataaatagaagcatgctgttgtaaagttattaaaatatatgaaaagtggtatcattccatttatttatctacttatttgataattcaaagatacatattgtaagcctgagaacaaacaaaaaactaaaagaagtatatctaataaatcaataatgaagttaaaatagaatcattaaaagatatgcaatctttccctgagaagaaggcagagaaaaagaagaaaaaaaaaagggggagtggggggacaaagagaaaaacaaattagaaaatgtttggcttaagcccaatcacatagataagtatattaatgtaaatgactgaaacactccaattatgggcagagattgcctgagtggataaaaagtaagacccaactatatggtgcctacaacaaatccactttaaatataaagcgaaatgatggaaaacatttacaatgaaaacactaatttaaaaaatgctgaaacgactatactaatatagacaaagtctatttcagaaaaaggaaattttgagagatatatagggagaatgattaaggaatcaatttcttaagaagatatagcaatcctaaatgtggattcatcttataataaagcttcaaaattcatgaaaaccaatagaactgaaagggaaaatagacaaatctacaattaaggtgtagtatgcaaacattcctcttttaataactgatagaataatcagagaaaacaaatcagtagggatatagaatttgtaagcgacactgtgaacctccttcactgaactaaaatttatggaactcttgaatcaacattcatagtggcattgcaattatgaaatacatatgaataaatttaacagcaaatgtggaaaatctgtacattaaaaattataattattgttgagagaaattaaagaagacttaagtaaattgaaagatgtaccttgcttaatggttagaaaattcaatattgttacttttccccaaactgatctacaaattcacagcaatttcaaacaaaatcccagcagacttcttttttacttaagaaacttaaaacatgattgtaaaatatatagagaagtataatagacctagaatagcccaaattgttctgaaaaataagaaagtttgaggatacagactatataatcttaagacttaattaaaagtacaggaatcaagacaggccggtattggtataaagacagacctagatattggtagaacagatgagtacctggaaataaactcacacatacatggtcaaataatatttgacaaaagtgctaagaaacatatataatcttcaacaaatgatgatgaagcagttgtatattcataagtaaataactgactgctctcttaccttgggttataagtcagggcttttacctactttcactggggcttcagactactgctctgcatcctgcccctgtcgtgacctgacaggcctctgatacaccctgttgtcgctggacccacgttactgctatgttccatgctattactatgtctcatcacccctgggaccaagtcatcatggcattccccaaagatgacacaggttcttactctataggcaatctgtatatgcccaggcctcagacattggtgtcaatgccaaataaaaaaaatgcacctgtgccccaggcaccacctcagttacatgtgcctctgaccacagagccctggcttcatggctgctctgggcacctgcacccagaaccagcattgctgactgtgcaccagtggccaggatcccaacaccaccacagctgcatgtgtgccagcacatcagacttagtgccaagaggaatcactttggctggaacttccctatgtgagataaaagttgaataggagaaactcaacagctttcaatactgaggaccttaacagccttaaccactacagttactacagacatctgcaactttggcttctgccatggatacctgcagtatttgccaacactgacttcggctgattaaactgcattgagaccatacctgtgtctttcttaaaacaggagatgttgcaccccatccagctggtgcccttgtagccattcacagctgaaagcatttccccactgtatctacttcaaaaagaccagatcaggtgacttgttgcctcaaatatacaaacatcaatgcaagttcactaaaaacacaaaaaagcagggaatgataacactggcaaaggaacacaatagctatccaggaactgacctcaacaaaatggagatctattagttatctgaaaaatgattcaaaataattatttttcaaattcaaaataattattttaattcttttaaggaagctcaagctgagcaagacacaagagtaaacagacaactcaagaaacaatggaaaataatacgtgaataaaatttaaagttcaacaaaaagaaatcacaaaaaagaaccaagtagaaattctggagctaaaagaataatgaatgaaagaaaaaatgcagtagagagctctgctagccgacttgatcaagcaaaagaaaaaatttgaaaacttgaagacagatcttttgaaattatactatcagagtacaaaaaatagataagaatagaaaagaggaaagaaaccctatagaacactgaaaataacaaaaaacagaaaagaaacccttattgaacactatcaagagaaccaatagtcacattatgggagattcagaggaagagagagaaagggacagagagtacatttaaagaaataatggttgaaaactttgataaccttgagagaaatatacatatccagatttatgaagttcaaaggttcccaaacagattcaatccaaaagacagcttcacacagacacattataatcaaactgccaaacattaaaaaaaattgaaagcagtaagagaatagtaacttgttacatacaagggaacagtaatagtgctaacagaacacttctcagcagaaaccatacagcaccagagaatgggatgatttattcaaagcgcaaaaagaaaaaaaaaaaactgccatccaacaataccgtatctagcaaaattgttcttcagaaatgaaggagagatactttcacagacaaacaaaagtgatgatgaagttcatcaccactagacctgtcttacaagaaatgctaaagggatcttaaattaagctaaaatggaagggtgttaattagtaacatgaaatcatataaaagcataaaatatacttataaatgtaaatttatagttaaattcacaatattgtagtactgaaatgatggtgtataaatcaactttaagtccagtataaaggtcaaaagacaaaagtattaaaagtaactataggtataatattttgttgttttgttaataaattcacaatataaaatatatataaatataaaatgtgtgctggaggagagtgacaggtaaaatggtagagattttgaatgaaattgaagttgagttgttatcatttctaaatagactgttattaagtataagatgttccacgtaaacctcatcgtagttgtaaaacagaaacatagtaggtatatatgagataaagagaaaagaatcaaagcatatcactacagaaaatcaacaaagcacaagggaacacagcaagcaagaaaggaaggacaaagaatccattaaaaataaccagaaaataaaaatagcattgtaaatttgtacctactaatcattactttaaatgtaaattgtttaaattctccaaacaaaaggaagagtggctgaatggatcaaaaattaagatccaactatatgctgcctacaagagattaactttagccttacacataggctgaaagtgaagggatgaacatgaatttctataaaaatggaagctaaaatagagcagaggtagcttaattatatcagaagagaacagactttaagttaaaaactgtcataagacaaagaggatcattaaataacaataaagaagtcaatccatcaagaagatataacaactatgaatacatatgtgcccaatatcagaatacctaaatatgtaaagcaaatattaacacaactgaagggagatacaaatggcaattcaataaaagtagggcatttcaacactctcactttcaacaatagatacattatctagacaaaaaatcagtaaagaaaattggacctgaactatatgttagtgcagatggatctaacggacacatacagaatattccattcaacagcagaagaatacacattcttctccagcacatgtgagacattcttcagaaaagataacatgttagaccaaatcttagctgattgaaatcatatcaagtacctttcctgatcacaatagtataaaactagaaatcaatcacaggaagaaaattttaaaatggacaaatatctcctgttccaccatagtaagatgtgcttgcttccccttcaccttccaccatgattgtaagtttcctgaggcctcccagctttgcttccagcacagcctgcagaactgtgagtaaattaaacctcttttcttcataaattacccaatctcagacatgtctttagagtagtttgagaatggactaatacagttttaattgatgcagtaaaaggatttgactgaattcacaagacattcatgataaaaagatttcttagaagaatccaaaagcaagaatataaaagaataaattgataatctacttcaaaattataacctctatatatcctttaaaattgtatctcatatatatcaaaaagtgttcaatgtttgttttttcttagctttgtatactgataggggctagaggcaatgacaacaatagaaatgagcatctattgtgcccagacattgttttctaaataacattctccagtaaaagaagactaagatagctgattccaggggtagactaaagaatatacaagatacatattgaacatcacattgtactggaaaataacaaactgctaaaaaacgatgggaacatatcaaaaggacatagaagccattttgatggggttccatatggtcaaatctggaagaattagagcatcacaggcacaaatgatagaaacagatcttaactcactgaataaaatgcaaatctaagatttcatacttatatagtaaacaagtaaataaatgtttatataggatagggagttatggtctcttaatagtagaatctaacttataaatatagaagggtaacagagaataaccaatggatgctaaatgtaatgggtgaaagtttgatgagtaagaagtttaaaaactttcaagtatctccccacaaactattatctatgaagggaaacagcaactttatagtggagaaacctggtagatatcaccttaacaagcaatcaaaattagcaccactaaaattaggacaatccatgatcatgtaccttctgataagataaactgagaagacattaccttgtttctgtggtattcctgccaaaatgcttaatttactctcatcatgaggaaatatcagacaaactcagctgaggtacagttaacaatataattggctgtactctaaaaatatgaaggttaaaaaataaatgctgggtcaggcacagtggctcacgcctgtaatctcagcactttgggaggcctaggtgggcggatcacatgaggtcaggagttcaaggccagcctggtcaacgtggcaaaacaccatctctactaaaaatacaaaaattagctgggtgtggtggtgcatgcctgtaatcctagctactcaggaggctgaggcatgagaattgcctgaacccaggaggtgaaggttgcagttagctgagatcgtgccactgtactccagtctgggcaatagagcgagacaccatctaaaaaaaaaatgctgaagaactgcccccgattaaaggagactaagaagaaatgaaaactaaaagcaatgccagatcctggatttgattctgttctgtgaatagacaatataaatgacattattgggacatatctagaaatttaatatggtatgtgaagtagaaaatagtcctgaatcaatgttgaatttcttaatttaaaaaatacactatgcttatgatgtaaaaaaaaaaaaaaaaagctcttcttcttaggaaacatacactgaaagagtaagaccagttttcagttcttaaatttgttatattatctttccaagttcagagcaaaaccctcaatatgagtgactactcatattttatcaaaagcccaatatcacaacatatccaaaggggaacaagactgaatttcaaaggttcttacaagaattctattccagcaaaaaattcttaaactgaaacgtgagatatgcaatttacttctaaacatagactcaaatggcaagtaacacaacttaagtctaaggatctcacaggctaatataaacaaactggcacaattaatcctaaataataatgtacaactggtcacattacaattggtagaccattctccattagtacttcactgtactgcacagtccttttagtgaaggcatttacagttatgtttgtataaagagacatcccagaatagtaaagcttaggggcatctccctactttgagacatttcagggtagtagagataaaaaacctctcttcttccccagagaatatttgcttatgttccagagtaaagataaatgggcagttcaccagcagacctacataagatgtgagtttttaaaacttggagttcctcttttattatgcacccagttgcacatgcaagtaccatctgccactcaccatgttcccctgtgggctcagagaactgatgcaagatcttgcactaagctgctgcttttgctgtcactaataaactatctttgttctgacccagaggactattttctgtctatatatatatatacatatatatatatacacacacacacatataatactgtcgcagacaaatttactattttctaagagggaaacatcttagacccttcacagtttctgacttaacagttgccccttgatatgttcttcaaaagagtaaacaattaatagtgaatggaatagtaaggccactgagttaactaaagttaaccacattaatccttgaaaattattttcctagttagacttcggccaaccaggatttagaacatcaagtggtttccacatatttcttataataatcatgattgtcttatgcttttttccccccttaatgtctaatgtccagatactgaaatgctgctacataggcattgtaatgaggtactatataactaataatctgttctataaagagactgaggccctcatggtcagtcagcttgggggttgagtttgaccaaaagggtgaaattgagaaattataagaagaagaatgataaagacctggtgtaattcagacaggcatactactaaatgataatgacataaataatacagaaaatgtcttccatatatgtgcgacaaactgaacagctaaagccttttggaaaagctagaaataaatgaaatcagtttagttgatgattcatacagctgtccaaaagcaaataccctgactggtcttttggccggctgctaactcattagcatctcacaatgaaaaaaaaatagaaaattcattgtttagaaagtggccgtggtttttctctctctgcttttccctttttattatatataaatgctttgtttgcattcattagatgaaatcaatctattacgctttaatgtgtattcaagtatataatatggtaataatcaatatatatctttcagttattctttttttattatactttaagttctgggatacatgtacagaatgtgcaggtttgttacctaggtatacatgtgccatgggggtttgctgcacccatcaacccatcatctacattaggcacttctcctaatgctacccctcccctagcaccccatcccctgacaggtcccagtgtgtgatgttcccctccctgtgtccatgtgttctcattgctcagctcccacttatgagtgggaacatgcagtgtttggttttctgttcctgtgttagtttgctgagaatggattccagcttcatccatgtccctgcaaaggacatgaactcatacattttcatggctgcatagtattccatggtgtatatgtgccacattttctttatccagtctatcattgaagggcatttcggttggttacaagtctttgctatcgtggacagtgctgcaataaacacatgtgtgcatgtgtctttatagcagaatgatttataatcctttgggtatatatccagtaatgggattgctgggtcaaataatatttctggtttgagatccttgaggaatcgccacaactgtcttccccaatggttgaacaaatttacactgccacgaacagtgtaaaagcgttcctatttctccaaatcctctccagcatctgttgtttcctgactttttaataatcaccattctaactggcgtgagataatatctcattgtgattttaatttgcatttctctaatgaccagtgatgatgagctttttttcatatatttgttggctgcataaatgtcttcttttgagaagtgtctgttcctatcgtttgccaactttttgatggggttgtttttttcttgtaaatttgttaaagttctttgtagattctagatattagacctttgtcagatggatagattgcaaaaattttcacccagtgtgtaggttgcctggtcactccgatgatagtttcttttgctgtgcagaagctctttagtttaattagatcccatttgtcaattttggctttgttaccattgcttttgatgttttagtcatgaagtctttgcccatgcctatgtcctgaatggtattgcctaggttttcttctagggcttttatagtttcaggtcttatgtttaagtctttaatccatcttgtgctaatttttgtataaggtctaaggaaagggtctaatttcagttttctgcatatggctagccagatttcccaacaccatttattaaatagggaattctttcaccattgcttgttttcgtcaggtttgtcaaagatcagatggttgtaaatgtgtggtgttatttctgagaacttggttctgttccattggtctatatatctgttttagtaccagtattatgctgttttggttactgtagccttgtagtatagttcgaagtcaggtagcatgatgcctccagctttgttctttttgcttaggattatcttaactatacgggctctcttttggttccatatgaaatttaaagtacttttttataattttgtgaagaaagtcaatggtagcttgatggggatagcattgaatctatgagcacggaatgtttttccatctgtttgtgtcctctcttatttccttgggcagtggtttgtagttctccttgaagaggtccttcacatcccttctaagtggtactcctaggtattttattctctttgtagcaactgtgaatgagagttcactctctttgtctgttgttgttgtataggaattgtagtgatttttgcacactgattttgtatcctgccactttgttgaagttgcttatcagcttaaggagatttggggctgagacgatagggttttctaaatatacaatcatgtcatctgcaaacagagacaatttgacttcctccctttttatttgaataccctttatttctttctcttgcctgattgccctggccagaacttccaatattaatgttgaacaggagtggtgagagaccgcatccttatcttgtgtcagttttcaaagggaatgctcccagcttgtgcctattgagtatgatattggctgtgggtttctcataaatagctcttattattttgagatacgttccatcaattactagtttattgagagtttttagcctgaagggctgttgaattttatcaaaggtcttttctacatctattgagataatcaagtggttgtcattggttctgtttatgtgatggattacgtttattgatttgcacatgttgaagcaaccttgcatcccaggtatgaggccaacttgatcgtggtggataagctttttgatgtcctgctggattcggtttgcccgtattttattgaggattttcgcatcgatgttcatcagggatattggtctgacattttctttttttgttgtgtctctgccaggttttggtatcagggtgatgctggccacataaaatgagttaaggaggaatccctctttttctattgttttgaatagtttcagaagaaatggtaccagctcctctttgtacctctggtagaattcggctgtgaatccacctgctcctggacattttttggttggtaggctattaattactgcctcaattttagaacttgttattggtctgttcagggatttgactttttcctggtttagtcttgcgagggtatatgagtccaggaatttatccatttcttctagattttctagtttattataaactagaaatactagtttatagtattctctgatggtagcttgtatttctgtgggattagaggtgatatcccctttatcattttttattgttcctgtttgattcttctatcttttcttctttattcatctggctagtggtctatttattttgttaatcttttcaaaaaaccagctcctggattcattgattttctgaagggttttccatgtctctatcaccttcagttctgctctgattttagttatttcttttcttctgctagcttttgaatatttttgctcttgcttttctagctctttttattgtgatattagggtgtcaattttagatctttcctgctttctcttgtaagcatttagtgctgtaaatgtccctctaaacactgctttagctgtgtcccagagattctggtacgttgtgtctgttctcattggtttcaaagagcttatttatttctgcgttaatttcattacttacccagtagtcatttaggaaaaggttgttcagtttccatgtagttgcatggttttgagtgagtttcttaatcttgagttctaacttgattgcactgtggtctgagagactgtttattatgatttccgttcttttgcacttgctgaggagtgttttacttccaattatgtggtcaattttagaataagtgcattgtggtgctgagaagaatgtatattcattgatgtggggtggagagttctgtagatgtttattaggtccacttgttccagagctgagttcaagtccagaatatccttattaattttctgtcttgttgattagtctaatattgacagtggggtgtaaaagtctccctattattgtgtgggagtctgagtttctttgtctgtctctaagaacttgctttatgaatctgggtacttctgtattgggtgcatatatatagttagctcttcttgctacattgatccctttactattatgtaatgcccttgtttgtcttttttgatctttggttgtttaaggtctgttttatcagagactaagattgcaatcttttttttttttttttgtgctttccattagcttggtaaacattcctccatccctttattttgagcctatgtgtgtctttgcacatacaatgggtctcctgaatatagcacaccaatgggtcttgactttttatccaatttgccagtctgtgtcttttaattggggcatttagcccatttacatttaaggttaatattgttatgtgtaaatttgatcctgtcattatgacgctagctggttattttgcctgttagttgatggcagtttcttcttagtgtcgatggtctttacaatttggtatgtttttgcagtggctagtaccggttttttctttccaaaactccatgggagttttatgggacttactttggagttatttcccctttcttttttcctaattcttcctttagaatgggtatgtttactttgtgctgatgtcaccattgtattttggaaacatataacttgtttgatttcataagctcacagttggagaagaatctgcctcagctttcctcaggagctcttgtaaggcaggcctggtggggacaaaatctctcagcatttgcttgtctgtaaaggattttatttctcctttgcttatgaagcttagtttggctagatatgaaattctgagttgaaaattcttttctttaagagtgttgaatattggcccctactctcttctggcttgtaaggtttctgcagagagatcctctgttagtctgatgggctttcccttgtgggtaacctgacctttctctctggctgcccttaacatgttttccttcatttcaaccttggtgaatctgacaagtatgtgtcttgtggtttctctctcaaggagtatctttgtgatattctctgtatttcctgaatttgaatgttgcctgtcttgctaggttggggaagttctcctggataatatcctgaagagtgtttcccagctttgttcccttctccctgttactttcaggtacaccaatcaaacataggtttggtcttttcacatagtcccatatttcttggaggctttgttcattccttttcattctttttgctctaatcctttcttcacgctttatttcattaagttgatcttcaatctctgatatcctttcttctacttgatcaatttggctatttatacttgtgtatgcttcacgtgctgtatttttcagctccatcaggtcatttatcttcttctctaaactggttatcttacttagctgttcctctaaccttttctcaaggttcttagcttccctgcattgggttagaacatgctcctttagctcagaggagtttgttattacctgccttctgaagcctacttctgtcaattcgtcaaactcattctccattcagttttgttcccttgctggtgaggaattgtgatgatttagaggagaagaggctttcttgtttttggaattttcatcgttttgtgctggtttttcctcatgttcgtggattcatctacttttggtctttgatgttggtgaccttcagatggggtttttgtgtgaatgtcctttttgttgatgttgatgctatttttttctgtttgttagttttccttttaatagtcaggtccctctgctgcaggtctgctggagtttgctgggtggtccactccagaacctgtttgcctgggtatcactagtggaggcagcagaacaacaaagattgctgcctgttccttccttggaagatttgtcccagagggacaccctccagatgccagccagagctctcctgtatgaggtgtctgtcgacccatgccagctagtgtctcccagtcaggaggcacatgggtcaaggatccacttgaggaggcagtctgtcccttagcagagctcaagcgctgtgctgggagatccacttctctcttcagagccagcaggcaggaacatttaagtctgctgaaactgtgcccacagccaccccttcccccaggtgctctgtcccagggagatgggagttttatgggacttactttggagctattatccctttcttttttcctaattcttccttttagaatgggtatgtttaccttgtgctgatcccaccattgtattttggaaacatataacttgtttgatttcataaggtaacagttggagaagaaacctgcctcagaatgaatcataccttgagtctcacccatatatgattcaggtgacttttttttttgagatggagtttcactctgtcacccaggctggagtgcaatggcacaatctcaactcactgcaacctctgcctcctggattcaagcgattctcagtatccctagtagctgggattacaggcacgtgccatcacgcacagctaatttttacaatgttagtagagatggggtttcaccatgtttgccaggctggtctcaaactcctgacctcaggtgatccacctgccttggcctcccgaagtgctgggattacaggcgtaagccactacatccagcccagatgatattttgatgagactttgaacgttaaacttttgagttaatgctaaaatgttttaagacttttggagctattagaatcaaaagaatgtattttgcatatgagaaagacataaattttgggaagcaaggtcacaatgttatggtctgaatttttgtgtttccccaaattcagaccatctaatcctcaaggtgatggtattaagagttggggccttgggaaggtgactgggtctttgggaggattccgccattatgaatggaattcattttctcataaaagaattctgagggagtttgttcactccttctgccaagcgcaaacaaagctagaaggtgctatatttgaagcagagagcaaagcagagagacagacactgaatctcctgagaccttgattttggactttctagcctccagaactgtgagcaataaatcttagttgttacaaattaccaatttgtaagatattttgttaagcagcccaaatggactaagaaacttctcttattttttcctcaaagacaaagtctctaacatttcaccatagagcatatttgctaaaatgtatcagattaagaaaaattccttccattttagctattagtttcttttgaagtcataaatggatatttaattttatcagatgtttttgttttttgcattcctgaccagaccatcatatggtttttctagtttatttgctaatgtgatgaactacactgattaatttaaaatgtttaaaaactttgaattcctggtgtaaaccaaacttggttatgatatgttatcttttttaattgctagatttatctatattttggttgggattttaaatccatgttcataaatgatatagacttacaactttctctttttgtaatacccttttcaagtttttgcatcgagttatgttggccataaaatgagatgaacatgatttcatctttaataattctcaggaacatttaaagtaatacttgtaaaatttatttctttaaaacttggtggaatttactctagtagccacatgaactaggatttttgcagtggaggctctctatgagatagatgtccaagctgtcattttcatacaagtgtcagttattcagaagctctgtaataactttcacctccacagttcccttataagggaaatgtgtttttttatctgatctattctaacaaacttcagcttctgaaccaggtgacacatctttatagtctctgaattctgaagtccccttgtctttacaggtcaaactctagagaagtgaactcagaagatggcttgagctcaactatctttcacagtaattacttgggctagagaataatcatatattcttaccgtatcaaataatgaaacagtaggctatcccacagtccattccttctctcccatcatccatcaactgtggttgccagctttcccatcaaataatattctagtaaagaagcaagcacccaatactctatgttcacatatatcctccacatccccctgaagaaaattccaggtactcaaagataagacttttttccatggactccttactgatggtttcaaggcattctcttggagcttataagactcagcttaggaagtacagaaataaaagtgaaatatataaggtaatgtattatttgataaaagttgattccaaataagcatagaaagatgaagtattcaggaaacggtattggcacaattcttagccatcaggaaaaaatatagtttaatacttacttcatatcttatacttaaaaaaattccagacagatcaaagatttaaacatataaaagaaaaaaagcatattagagagaacataatttttttgtttttattaatttttattattatcttgaagtgaggaaggactttttaaataagacacaaattcagagccataaaagataacaaaaaatagaattgcaaaaaattctttaaagtaagaaccatcttaaacaaagtcataaagcaaacaaaagcagggaagatcattgcaaattacactatagagaaagctaacttccctaatatgcaaacagttttcacaaatctctatgaaggccaacaactttacagacaaatggacaaagaatagaaacagaatgtcacaaaacaggaaaagatgttcaatttcacttaagatatacaaaaattttactgatattataataacatactactctttacttaacaaactgaccaggatggaaagtttgattatacattgtagttagaaaggttgtaggaaagtagacattctaaacattggtggtgggagtatagtttgacacaacctctgtggagggctacaacctagaaataaggattaactgaaattaaattaggctttaatgggaataaaatccaactttcaaagacctgatgtctgcttgaattatgttgttctgacccttcaatagttttttaacctagactgccagaggaaatgtagatactttctggaggaaagtatcatctagaacctcaaattataatgttcatttctcaattaaaaaaaaaaccaggaacaactaataaaaaaatcatacaaactggcatacatgaacataatataatgtgacccaaaactaagaaatgtaatagactagataccaaatatggaagtatcaaacacatatttaaagtaacacattttaaagtcatacattcaatatgttcaaagaaataaagaatagagtgataatttaggaagagaacaggatgttttaaaataatcaaatgtaaggtctagaactgaaaaataaaatagctgaaattgaactccataggtggatctaccatcagatcagacacagttgaagagggagttagtgaactctaaaggataagtcaaaagaaagtatccaaaatgaaatataaagagaaaaaaagacaatataaaaacaaacaacacagtttaagtgtaataaaatcctaacaatctcctactaacatcaaaattgggaacactatcacaggtttgacttcaagaaagaacaaaaaaccataatgtaaatttaaattatttttcttatatattgtttaatctaataaaaatccaggtaagggcttcttttcatttttaggacttaagcaaggaacatctaaaaaatcaaacatattagctaaataatacatatcataaaaaagtttaattacttacattccatatgctgagcttacagcaagactagtaatctgttgtggaggttcaccatctacccacaccaattgaataacaagttctgcttgatatcctggaggcattcgcactggccgtgtcttcacactttaagaacaaaaacaatcctattatatacagcttaaataaacatggtcaaacttatcttgagaatttacatagaatcatgctacagaaatatacaacaccaggcattgcaggcagcatgcagatggatggtgccttctagttttctcaaaatatgctgagtcccttatgattacttagttatttctttatgtggcttttcagccagttaggtccacaacttcaactggcctttatcatttcaattttttcttttgagaatattattttaagttatttttattatgtaattatttttctaatgtaatatatgttacatatatatcagttataaagcataacaataaaacaaatgaccattaacctaccctccagtgtaagagttcaacatatctagcatctgaattcctattttcctttaaagctgactaatatctttctctcatacttcccaacaaaccaattatcaaatactactgatgctactttcaaaaaatatatccactagctaaaattttatgatgatgttttctctttgtagattttcctcccagtaatatttgctcatatttccttctttttatgtacatcaaaagaaaattttgagaggacaatcaatgattacaaaagtatagcatctgctaattgcatgaattttgctcctaaaatcttatctctaaattttccataagcatatttgtaagaaatgagaaaactagctgtctaaagttttttgagtggcaaatgtagatatgcagctcaaagaaattccctgcttaggtttaattctccagccagctaacactagaaatatttgatttgatggtatagaagcagtaagtagtaatttatactctattactaaaatcataaaatattactatgggctttgttaactttaggttttattgaacatgatgcaaatctttgtttagcttattaataaatagttttaaaaaagaaagattatgaaatatactagcaatcatgagagaaatccttttttctaatatagaactcttgtagtagatagtaaacttggttttctttttgattccaagaaagctaaagaaattacataaacatacttctttaaaaaattatcattattatttttttggagacagggtcttactgtcacccaggctggagtgcagtggcaagaccatagctcactgcaactttaaactcctgagctaaagtgattgtcccgcctcagcctccctagaagctggagctacaggtgtgtaccatcacacccagttaatttttaaattttttgtagatacaaggtcttgctatgttgcccaggctgctctcaaactcctagtctcaagcattcctcccacctcagcctcccaaagtgttgggaatacaggcgtgagccatcacaccccataaacatactttttcaattggaaatatcatgcatgtcaccaagtttctgccctgccaaacttcctattctgtgaaagccatgttttctttagagtccttctgggaaggaaatatataaataagtgaatgaagggtgaaaatattatgccctcttcacagatgttcaaagaaaagaccagagtaacccctgaagaattgtagatcacctgacaatagcttgataataagagaaaattaatttcatttgtcacagtttcaaagacatatgattaatatctaaaattgtttgaaaatttggtagaaactcttacttgaggcatggaatactgtcctttgttactccttcactagcaacagtgttagtgctcccagaaagactccttgaagaaggaagctgggctgagagatctggaaacggaggacttgtttctggttcaggggtaataatatcttcaacatcatactgaagtcgtacctctaatgacttaaaaaaatcaagtttaaatttaatttaagtcacactaataatcatcgttttaatttaatctaagtcataataaataatcacattaaaatacctgataactttttaggaatcattcacacagtttttttcaaattaataagttcaatactatttacaggaaagttgagaagtatctcatactaaatcaaatagttaattatatggaatattcaatggcaatcacaaaaaatgtaaatttttaaacttcagaattaaaagaaaaatacctcagtgaagataaagtttttatataataaatatactttaagatatagtataaattacaatttatatattacaatttgatatatgataaaataaaaggagaagttgattatggttattccaatgaaagaaattaaacttttttcatatacacacacaaacgtgtatatgtgtgtgtagtgtgtatgtttgtgtgtgtatgaaaaaattacttgtttaaagccttttagtataaaaaactttcattgcattttaactttgcattaattcactaaaaattttccaaacaaaattccatatttttggttgtttatttcattaccttggcttttgtttaatctaattagcagatcagaattacttgataaaaaacatataataatttacataggaataaaaaggtgacctaaaaacctttattaaactaaaaaagttttaaaactaaatactttatgaatgcataaaatgcattaaatgatttaattagaactgattttataacacatatttgccttataatgtaaaaatgagcatttttaagattgaaaacaattacttacaaaaatgtcattatgggaatatcaccaaaattattgtcataattattttaaaactacagaaaaacctctggtggtgacaaaacagttaccaattattgagtgcttactacagtaaggacactattataatgtctttatataatcatcacaagaaccctatgaaattggtatttatattccaagtttatttttattttccattttcccattttatttacacagggaattgtacatgtgatgaaactgaatcatagctacattctactactgacttatggcttgttcagagtcacacagatatttaatgggaaagccagaattaaaacctaggtttatctgactcaaagccttagctttcagctactatacaataaaagggtgatattaattttagctgttgaggtaaaaacacttatacccaggcctatagtaaataatctttatattctggtaaaaggggcaaggtagagaaggacagttgtttataggtggcttcatttagaattaatttatcccataaaatcattattcttttgaataagcagagtatttcgttgatttaaaaattaagattaggtaaggttgccccataattagatctaccccataaaaatgttgctacatagaaaatcattaaaaataaccttattgtagctgagaaataattatttatgtcaaacagttgatgagaaaatacaaatcagataaacttaaaaattaataaaagtatagaacaaagcctgcattaatttgatttttatacaaaaataaatcaataactatatgtataaaacctatacattttattagtatatatagaagaatatataggtgtatattccacaatatatacatagttcaaaacatcatgttgtagagttgacttatttcggccaggtagatgcaactcatgtaacatcaaagagaaaagtgagaaaattgtaacatgtttaatttgtaacaagattaacttaaatactaagcttgttttgacattgaaaaaaataccaagttttgatagagaattgttttggccttttaggccaaatcatttattaatatgttatagtaagtaacaataataatttaaaatcctgtgaattgtattactagccacatactgcacacttcatggaaaccataccaagtagtagtcaaatctatgataatagctttcttttaataactgtaaaagtgaaagttaaattttaaataacttaccactatttctgttgtaatttcatgtctgctgaatttataaattatgacatatgcagagactcctgatacacagaatattctgctctctggacaccagtaaatcatctgaatggcaaatgggtcttcctctacaatttcacatgtttgttttccttctcctaccttctgtttttcaaacacttttgaagtttttagcttgtacagcatctgcagagttactataagacatcgaagcacagttatcttctaatttaaacttaattcttagatgttattaaagcttttccaatatatttgttaaacaacaaaagtaaacctaagtagacaaagtgaattacattttaaccagtaaagcattcaatgccacgctttcatatcagtacagcagctagagggagactacagggaaaaaaataaacattccttgaatatatactacataccaaggaatatatagttgctttcttgtgtcattctcagaaaagtctcatgaaggaagtatttttatcattatttattgataaaaatattggggcacagaaagtctaaaatgggaatactgaaaataattcttccctagcggagactcctctattctttatctcagttttcccctttgattgttaggtgagaggttgatggtattcctagagggtttactactctcaacaaatttttagacactccttcagataagaaacattgtaatttaccagttagcaatattgggagtccaagaatctgtaactatttgagaagggatcttttctgagtggctctgtgtcaagaaagggtcagatataatctcatacattgtgtttgtgaactgtttttaagaatatttgggggaatatttttccattggagaccatgatgataataactctataaaagaactatgattctacaaaggatccttgagtaaagttttaaatatgaatcctgtgaaaagtgcatcacctgaatctaataatgagaaacattagtcaaaaccagactgaaggagattctataaaataaccggcctgaactcctcaaaaatgtcagtgtcatgaaatgaagactcaggaacttttccagagtttttaaaactcagaagatacaatgactaaatgcaaaaataatcctggatttttttgtcgtaaagaatattaatttgcggccgggcgcagtggctcacgcctgtaatcccagcactttgggaggccgaggtgggcggatcaccaggtcaggagatcgagactatcctggctaacgtggtgaaaccccgtctctactaaaaatccaaaaaaaaaaaaaaaaagaaaaaaaaaaaattagcggggcgtggtggcgggcgcctgtggtcccagctactctactggggctgaggcaggagaatggcgtgaacccagggggcggagcttgcagtgagccgagactgcgccactgcactccagcttgggcagacagagcgagactccgtcaaaaaaaaaaagtatatatatttatgtgtatatatacatatatatacacatatatatgtatatatataaatttgcaaaagctgaataaaatccggagattagataatagtgttgtgtcagtgttaatctactggttttgatgactgaagtctggttatgtaagtgaatgtttgtaggaaatacacactgaagtatttaggggtatgtaatgtgtctccaacttactctcaaatgcgtaagaaaaaaagctatatgtatatatgtatgtgtgtgagagaaaaatgtatggaaggaagagataaagagtaaaagagagagccagggagaggaaaggaatatttggagaatctggttgagaggtataaaccatttcatagtactttttttttttttgcaatgtttttgtaagcttgaaattatgtcaagctaaaatagattttttaaaaaatagacaaaggattgtattgcgtgctatagcctggcttctgaggtcagatagggtatcattcctatgattatttatgttacatgacaacagtaaaatgatattgcagacatcattaaggtccctaattagttgactttgagttaatcaacaaagagcttattcttaacagccaaaacctaatcagatggcccccttaaaagagggactgaggccctccctgaaggtaaagagacactcttgctagctttgaagcagcaagctaccatgagctctgaatgtgcaagaaaatgaagtctgccaacgattacataagcttggaagagaaccttcagtctcatgaaacctcagccccagccaacaccttgattacagtcttgtgacaccctgagcaaaggacccagcgaaggtataatcaaattcctaacacacagaaacagtgagatgataaatgggtattgttttaagttgttaaattgtggtaatttattactcagcaatagaaaactaagatacataataatataaactcagttattcaaattcattttgctttctgtattagacagtgtttcacaaagttagcaaactaagtaatttttttaagacatccattaagttggagatatgaccttgattacagtgaaaatattaaacatgctgcaatcatttgcaatttatattctaaatgtgataaaatatttatttaaaaattaacttctcaaaatattattatgcatgcttaagggtgttattcactctaataattaaagtgttaaagtgtcctctaaattttattttatttatttatttatttatttatttgttatttttctttttggagatggagtcttgctctgtcacccaggctggagcgcagtggtgtgatctcggctcactgcaacctctgcctcccagattccagcaattctcctgcctcagcctcccgagtagctgggaccacaggcgcatgctgccacacccagctaatttatattatatattttttagtagagacagggtttcaccgtgttgcccaggctggttctgaactcctgagctcaggcaatctgcctgcttaggcctcccaaagtgctaggattacagatgtgaacaactgcgcctggccctccacattttaaaagccaaaaagcgactttgaggtggtgggaaaggagcaatggcatcactatgcaatgaattttgttccaggaacaaactcaggtttgcatgagaagattcatcaacagaaagtctgttgtcctttggagtttctctttaggcagttgctttttattatgtgaagtcagaaggggacttcagaatgtgtgggtttagatcttttaatccttttctcttgctgatagttagtttgcttgctcaagggactctaccttgtgggctaagagtatcatcaatattcaaccttcttcctctgcttgtgtgtttattgcagtcttcctcagaagctattcatttctacagcttcaaacatcacttttatgctgcttcttcattggtttccatttctgactgttctccttacctgctggatatttttacttgaattttatggttttactaaaaaattcaaagctctcttttattccttatttccaaaagagttacctacatcttcctggttactcatcttcagaaacttagagtcactgttaacttgttcttcactcctattcctgtcaaaagttaactaacttccaaaactcacactaaatgttaactccatcaaaatacctttcctggatctaccaggtctcaataagactctcccatttctgatagcaaacagatctggggtactgcattgagagttcttatattgttttccctatagttatatatgtgcatttctttatcttttctaatgactacaatttttctgaagggtatatatgagtataatgaagtcttaagtatctttgcattccttcaacattgagcagagtaccttatttattctgtaagttacataattctcaagaatttaaaaagagttcttatagttatcaaatcatttgatctttgcaggatgtggtagatgagtggggaaaaaaaagtgaagactagagggatataagcacttggcgaagaccacacaggtagagggtgaaggaaattccttgaacagagttaatttaacagagtttggtactttttctgatgtatcatgcctcttgtagatataatgggttgctgacaaagagtgacttagtcttgtttaccttatattatagaagagaagtaaagcagagataatactttcaactgatctaacagtgtaggtaatagatttttgtaacacagccacatatgtgtgctaaaaatatatctgaaattttaattgcccaaactaaaaagtggtagctggctataagtaaatattaaccaattggtttctgttgtacagaaacttgaaacttacttgcagaagcatcccaaaattttattgatccatctgcatgactagatgagaaataaattagcattaattaaagtatactaaataaaaatcataatcactccaaatgtacagaaacttgagttactgttgatacaattttgattcaaaaataccactttaatgaaaactaatgtatgctaaaccatttctaagcttaaaacaatggctcatttcttaaacaatatactaaaatctaaagattagaaaaagaacaataattccttagactttactgtaaaaaggttatatgtgtaatggagaacaatgaaaaatggcctgtggaaagtgaacaacatattttcatgtaaaattatttatattcaataaaaggatagataattttgatattaatataaatgtgaattgaatatcatagtaaaattcagttaagtttcaaaatataaaagcaaatcaccaaatatatctagagttgcatcattatttggtaataatcaaatgtcaattctataaaaactcatcgagaaaatagaagaagataaaatacttcccaacacttttgatgaactcagcattaccctgacaccaaaaccacataaaaacattacaagaagagaaaattacaaaccgatattcctcatgagaataggcataaaaattgtcaacaaaatattggcaatacaaatcaagtaatatatagaaaggatagtacataatgactaagtgggttttcttaggaatgtaaggcaaacacttaaaaaatcaactaccatattaaaattcaccatattgacagattacaaaagaaaatccatacagtcatctcaataaatgcagaaaaagcatttgacatgatttatcatccattcctaaaaaaaactttcaataaactaggaacacaggaaatttctataaccagataaagggtgtgtaggaacaacctacagatatctcctaacatacataataatgaaagattgcatgttttcccctaagatcaggagcaaagccaaaaaaatgttcactctcaccattcttattcaacatcttattggaggtgttaagcactgaaatagggaagaaaaagaaataaaaggcatacagactaaaagggaagaaataaaattgtttgtatttgcagattatatggctatgtagaaaatctcagagattctataaaaaggatactggaactcataaatgattagcaaaattgtaacacacaatatcaatatacaaaaatcaattgcatttccattgaatagcaatagacatttggaaataacaaaatagtaccacttacaacagtgccaaaaccaagaaatagataaaatctaacacaatttgtgccagatctgtatgctgaaaattgtaagatgttgaccaaaaaataaggcattaataaaaggagatatatattattgataattgtatgacttattagatgtttgttcccctaaatggcatataaattcaatgtaatcacaattaaaatatggtaaaacaattttttgtagaaataaacaaactgatggtcatacgcccaaagcaatgtgcagattcatcactattcctatcaaactacaaacatcattcctcacagaagtagaaaaaaaaactattcaaaatttcatatgaaaccaaaaaagaacctgtatagctaaacaaaaagaacaaagcaggaggcatcacactactcaacttcaaactatactataaggctacagtaaccaaaacagcatggtactggtacaaaaacagacacatagaccaatggaacagaagagaaaactgagaaagcctcacacctacaaccatgtgacctttgacaaggctgacaaaaacaaacaatggggaaagaactccttattcaataaaggggtgctgggataactggctagccatatgcaaaagagtgaaaactagacccttacctttcaccatatacaaaaattaactcaaaatggattaaagatttaaatgtaatacctcaaactactaaaatcctagaagaaaacctaagaaatactcttcttgatatcagccttggcaaagaatttatggccaagcccccaaaaatgattgtgacaaaaccaaaaattgacatgtaagaactaattaaactcaagagcttctgcacagcaaaagaaactatcaacagactaaacagacaacctacacaatgggagaaaatatttacaaagtatgcatctgacaaagtatgtctaatacccagaatccatgaggaacttgaacaaaccaaaaagcgaaaaccagataatcccattaaaaagtgggcaaaagacatgaacagatgcttctcaaaagaagacatacaagcagccaacaaacatgaaaaaatgccatcatcactaatcattagagaaatgaaaatcaaaacatggccaggcacggtggctcatgcctgtaatcccaacactttgggaggccgaggccagcagattacctgaggtcaggagttctagaccagcctggccaaaatggtgaaaccctgtctctactaaaagtgcaaaaattagccaggcatggtggcacatgcctataatcccagctactggggaggctgaagcaggagaattgcttgagctcaggagacagagattgtagtgagccgagactgtgccactgcactccagccaggccaacagagcaagagtctgtctcaaaaatcaaaaaaaagaagaaaaaaaaagaaaatcaaaacacagtaggataccatcgtacaacagtcagaatggctattattaaaaagtcaaatagtaacagatgcttgccagatggcagagaaaagagaatgcttaaacattgttggtaggaatgtaaattagttaagccactactgaaagtagaaagcggttgggagatttctcaaagaactcagagctaccatttgacctagcaatcccattactgggtatataaccaaagcaatataaatcattatacctaaaaggcacatgcactcatatgttcattgccatgctatttacaatggcatgtggaatcaacctaggtacccaacaacagtggattggataaagaaaatatagtacatatataccatggaatattacacagccataaaaaaagagtgaaatcatgtcctttacagcaacatggatggagctggaggctataatcctaagtaagccagcacaggaacagaaaactaaataccacatgttctcacatataactgggagctaaacattaagtacacatggacataaacacagaaacaatagacactgcagtctactagagtggggagagaaggcgagggatttggattgaaaactacctattgggtattatgctcgctacctgtgtctaatatacccatgtaacaatcctacacatgtatccctgaatctaaaataaaagctgaaattattttttcaaaagaaaagaaactagattagccaaagcaattttgaaaaataaaaacaaagttggagaactcaaactacataaggtttaagtctcaccctaaagctccaataaagtttttgtgctagtggtgaaaaacagacacatatatcagtgaaacatattagagagtccagaaatagaaccatatgtatatagccaactgattttttattttgagagggggttagtcactgagtggcttactctactttaacagctttattcagatgtaatttacataactataaaattcacccactgggagtgtacagtttgataatttttagtaaatttacacagttgtcacattgacaccatcatccagttttagaacatttccattaccccaaaaagttacctcatggcaatttgcaaccctctttctcatccctagtagatccccaataatctactttctgcttatatagattctttttttcttagaatttttatataagtggaacccacataatatctactacattttgtgtctgcattatgcacttagcgtaatgtttttgaggataatatttcttacatgtattaataatttgttcctttttgttgctaaatagtattccattgtatggatatgctctacttaccccttcaccaaatgatgaacatttgggttgttttcagtttttggctgttacaaataaagatgctatgaatgactttgtatgtttactctaattataaacttatagatatttttaaattttattgctgaaaaatctgcaggatgttgatctgagactctatatacccttacaaaatttaattctattttatttttcatcatgtaatacttgatatgaaaataacaatgtatgtaacatagatttaatatacagaatataatcgtattgaaaccactcaaccaaagaactaacattactaataacttgcatctacagatgtgtggtctaacagagcactccccaacctttttggcaccagggactagtttcgtggaaaacaacttttccacagatgcgggtggtgagagatggattcgggatgaaactgttccacctcagatcatcaggcattagttagattctcataagaagcgtgcaacctagatctcttgcatgtgcagttcacaatagggttcgtactcctatgagaatccaatgctgtccctgatctaacaggaggcagagctcaggtggtaatgctcacttgcctgccacttacctcctgctgtgtggcctggttcctaacaggccatggactggtactggtctgcagcccaggggttgtggacccctggcctaacatattacttatcctagaacaaggtccatgtgtgcttaaggagaatatttttctcctattgctaggtatagtgttttgtatgtctgttaggcccaattgttctatagtgtttttcaaataccctgtttccttcttgatcttttgtctagttgatctgttcattactgaaaatgtgatattgaaatatattactattattgtgttattctgtttgtttcttcaattttgtcaatgtttgcttcatatattttgatgctctgttgttatgttcatacatatttgtactttttatatctttctgttggattgactcttttattattaggtaatgtctttctttgtcccttgtgagttattgacttaaagtccaatataaatgtattcatctcattttcttttggttacaatttgcatggtacatctttttctatcctttcactttcaacctatgtgtgtccttaaatctaaagtgagtttcttggaggcagcatatagttctacttttttcaatcaagccattctatgtcttttgattagggagtttaatcaatttacatttaacataattattggtacagaataatttactaatgccattttattattttctatatgttatgtggttattttgactttcttttcttctcttgctggcttcctttgggttttgttttttttttttagtgacatacttctattcctttttcattttcttttgtgcaccttctataggcattttcttcgtgtttaccatcaggattacataaaatatcttctagttataccaatctattttaaactataacaactttaactacatacaaaaaatctactcctttacattcactatctcttcatgttattgatgtcacaaattacatatttttatattttgcatctattatcatagtattatagtaatttttatgttgttattgtttaaattatatgccagaaatcaaagtgatttatccaccatctttaaaatcttacgatattctatatttgtctataaattcaactttaccagagagcttttaagtttttgtatgcttcggtggtgttgtctagtgtgtttgtttcaactgaaggaactctcagcaattcatgtaagacatgtctagttgtgatgaattccttcagtttttgtttatatagggaggtcttattgctccttcatttttgaagttggttatgacaaatatagcattctaagttggtggggttttttttctttcagcactttgagtatattatcccactcccttctagtctgccatgcttctgctaaaaaacctgctgacaatctcatggggatttccttgcatgtgataagaacttttcttcttgatgctttcaagattttctttttgtctttgattttcgacagtttgattataatgtgtctctttatgagcttctttgggttcatattattggacttgtttaagcttcttgaatttgaatttccatttctttcctccaacttgggaaatttttgaccattatttcttcaagtaagctctctgctccattctctctactccattctctctctctctgtctctctctctctctccccgccccttcttaaattcccataatgtgtacatcagtccacttgaatgtgtttgtaaggctcttaggccctcttctttttgttcctctgactcaataatttcaagtgacctattttcaagttcactgattctttcttctgcttggccaagtctgttgttgacactctgtaatgaatttttcaaatcaattatcatatacttcagatctagaattgtttttttttaataatttcaaactctgttgatattctcattttgttcatgcatcatttccctaattttgtttagttttctatttgtattctctaatatattgagtttctttaagatgattattttgaactctttgtcaggtaatacacagatttctgtttctttaacccttttcccatttagaataaaaagtacagtttgcttccagtgctcctttaattttacgtaaacacactttttgaggctgaagaaaatctgactggttttcaaggtgaaaataaaatatgaaagctgttcctggagttatttctgaacagaactaacatcagaatagtctatttcggaaaaaataaattcaccaaatgaatcctcagccaacaactgtacaagaatgatgttaacttcacacgtaggaatgctatgtttcctaggataagacattttcagtgatggagaattactatattttgtaaatggaaataccactactaaaaccagaatgctataaatagaatgatgtcttttatttccaaagtcaatatactagagtgatacaacaataataataaaagtgagatattttgaggcaaagttatcttggcataaatgttatagctgcaagtgctgccagtgagtattctcggggcaagtaggaaaagggttaaaatcagttactggacttttttttttttttgtctctttgattgggccatgtttccctgtctctttgtgtgctttatttttgttgactttaatgtgaaaaattagtcatatccttatggactgactttgtacagggaacatttttcataaatcagcccaggtagacattctaagagcctctcaaaccttttatgggaatttgtcttctctgggcttgtgcatgtaattcctaactagtgaagttttccagtttctttcaggaacttgtagtatcttgctgctctagtatctgtctgaaatactgcaggttctctgatgctacaagccactgaaatatattttgctctcagtggcacccaggaatccaaagtttgccagatctctatcagatgacacagaaactagtcccttgagcagccgctataacatatatccagaacattgtgtatatcttccgctcttttctttccctcaaaaaggtgaagccatgagtaaaggtgaagccatgagttgcacttttcctcctaattgtgagctctgccagcttggaaaaaggactgatgtggctgaaacgccctgcttttcttacccatttcaatgtgaccattcttggctttgagcttgtctggggtactgtgacttcctaaacggtttctgaagttgtcctaatggctttttggaccacatattgttgtaaagtaagtgtgcctgtggagaacaaagtctagggcttcctattctgtcaccttgttgatatcactctcaattaattctttttttagtttttttttctgtctttttactctcaaattgtctatgctgttatatttgaagtgagtgtattgcagataacatatagttggtcatgtttttaacccactctgtcaatctctatatttgaatggaagtatttagaccatttctatttaatataattattgatatattagggcttcagtataccatataattttttctgtttccttttttctgccttcctgttacctgaattattatagtgcttccattttgacgtgtcagtagtgtttttaagtgtacctctgcataatttttacagtttttttaggtattacattgtaccacaacttatcacattctatgagtgtcatcttattaccagttcaagatatataaaagccttaactctatttacatccttttaccctctcttatttataattgtgttaaatatctcctctatacacatttagaaccacaccagacaatgtgattatagtaacatcagactctgttactataatctttgcttcaaccataaaatatacatttaaaaatccaagagatggaaagcctattgtatttatccatacttttattattgcattatttcttccttcttgatgaaccaaggttcatttcctttctgtgtagggaacttcctttagctacttttttaatggtagatttggtgttgaaaaattcttttagtttattgcatctggaaatgatagattttgatcttgattttgccttaattcttgaaggatattttcattggttataggattcaagattgatagttcttttctttcagtacttgaaaactactcatttttccttttggcaggcagggtttctgatgaaaaatctgctgtcattcaaattggtttggccccataggtcagatgtcatttctctactgtggctttccagattttttttctttcagtgtttactgttcagaagtttgacaataatttatcttggtatagatttattggggtttgctcagcttctggaatctgaaggttcatgttgttttgctaaatttgataagttttcagccattatttccttaatactttgcagtcccaccctctttcttctcttccttcctcatttatttctgttgacacagggaaggggatagggagtggtagctactcattactgctaggcagtggtgagaattctagctccccactgacaccacaggggaggggtttcacccaccatgattcaaagccccagctccctactctgctttatctgacactctggggaagttgggggtacctcattataccctgataagggtgaaactctaagctctccacttggcttttactggagtgagttggggtggggccacagtttgtgtgggaggaaggtgtgtgcgtgtgtgtgtgtgtgtgtgtgtgtgtatgtgtgtgtgttgttgttaaacctaagtagagagattattttccatatgttttctgtcttgatacactgccactttcttcattctatgattaaagagagctagattttgttgggatttttaatttgtgtttattcccagttctaggttactagcttctttagctctaattctgggatatatgaggcagaaagaaaacttagggaactgacttccatgtcattctctaagacttaggggtcctacttggtctgatgcgtcttcacatttcccagtcatcttatgtttgtcttatatgtaatatccagagtttttagttgtttagtgggaagaataggaaaaaatatatttactctatcttcccattagcagatcccttaattactttttaaatctcatatttatcattagctatgtctctatttttgttcctaatattaaaacatcaagtgggttgtcatacaaaggagtgttatttctggtgctgtaagttttgagaaatatttaaaataaccatctcgtacagatacagagcagtgattcctgaatttggcagaaatagataagtgtttgtaagggcctttgtaaagctaatattctgtgatttccatgaagactaatatctcatgacttcccaactttgaccttctcctggtgatataatctatgctttcttttctgttattatgtttccaatggtttgattatatcctctgtcaagatgagaatctttgggtagaagctatttcttatatttttacttttacttaaactattattctgcatagaacacaattatggaaaagtatcaagactcagtaaacatctttttgttgatgaactaataactcacaaaacacatctacttacccagtaataataatttctggatatgtttgtgctccaaggttccaagctcctccactgattggccactcctaaacagattatccagaaagaatatatatacatgtttaaatggcttagaaatttaaaatgaaaatagcttaaaataatgataaaaagctcacttaaagaaaaataagtgtaaaatcatcaagaatgaagtgtgtagctgtcttttaattctttcattgaacaaacacctctaaatgcacaattccatctcccttaaaaatatagattttaatcaatcttaccatttatataaacaaatcaaagaagtatttttaattgtacaaatacagtgttgctacatgcatcatatagtctgtgtaccaccaaactactgtggtgccatttaacatagaagctatgtaaatagtgtctcttgaagttgtccatcccaacagccctgggagaataatagaaatcataatagataatctgttacaattgtaaatagttgaatcttgtagtaaactataataaaaaattctagaatgttatttaacaaataacttttaataattatgtttcctaaaccattaattaattataaactaggaagacctgagtctttttattttctttattttattttattttatttattattattatactttaagttttagggtacatgtgcacaatgcgcaggttagttacatatgtatacatgtgccatgctggtgcgctgcacccactaactcgtcatctagcattaggtatatctcccaatgctatccctcccccctccccccaccccacaacagtccccagagtgtgatgttccccttcctgtgtccatgtgttctcattgttcaattcccacctatgagtgagaatatgaggtgtttggttttttgttcttgcgatagtttactgagaatgatgctttccaatttcatccatgtccctacaaaggacatgaactcatcttttttctggctgcatagtattccatggtgtatatgtgccacattttcttaatccaatctatcattgttggacatttaaacatattttttcatctaaaataaaggttacatcttatgactcaaatatatattagtataagtacatacttagtatataaatgtacatactagataagtatatcttagtatataattatataccttctgtataagaaattatatttctataggcttaaagctatgtagcatttagaaaatttgaatttaagaagttatgtatttaatagatgttggcttataacttaaaaagaatttagttaagtcctcctatatggaatgtaagaaaataaagtaatggaaaaaagtatgatcatgtgatatgaatacaaaaaaagttatttataatttctacttttaccttattactgtatccttgttttttatgcttgactcctatagaatacagtactagaatcaaatccggaggacaatctgcaaagtatgctgtgcatgtaactggtgattcatgaatgtccatgggatatggattttcaaagattggaaaactaatagataaagacaatatatcagtgttattttacaaagaaaaaaacagaaaataattttgataaagtaagccctaaaatgtctctaaacatcactataaattttgcttgttttttaagtaccataaaacaagaattgtatgaacaaaaatgctctttttgtaatagtaatttataaaatgtaatattaatactagtaaaattttactcaagctcaaaatttacttctcataattctaacattccacagtggcattgctttgctaatatagatacaatgaattctattaatctgaaactattatataacaagtttacttagttaattcattaaaaataaaccaagcactttacctatatacattggtaaatatttatttagtatccttataaatattaaaatataagtaaattttgactttctttcaatgggagtgctatggtttggatgtttgtcccctccaaacctcatcttgaaatttagtccccagtgttggaggtggagcctaatgagaggtgtttggcttatggggcagatccttcatgaattgattaatgtcctgtcttggaggtgaatgagttctccctttttgttcctgtgagagctggttgttaaaaagagcctggagccttctccttctcacttgtttcttctttcatcatgtaatctctgcacacaccagctcagccccgcttcacctttcaccatgagtgaaaacagctcaggttctcaccacatacagatgcccaatcttgtaaacaaaataaacattttttttgaaaaaaaataaattactagcttcaggtattccttttagtaacacaaaacagactaagacagaaaattagtactaaggagcgcggtgttgctataaagataactgaaattgtggaagcactttagaaatgagtgatgggtagaggttggaagagtttggagagctcagaagataaaaagatgagggaaagtttggaacttcttagagattggttaagtagttgtgaccaaaatactgacagaaatatgggcagaaaaggctatgctaatgaggtctcagacagaaattaggaacttattggaactggagcaaatatccccattgttgcactgtagcaaagaacctggctgcattgttgcactgtagcagagaatttggctgcattatggaaggctaatcttaagagcgatgacctagagtatctggaagaaaaaaattctaagcagcaaagtgctcaagaagtggcattgttacttttaacagcttacactaaattatgtccacaatggaatcacctaaaggaagaatctataattaaaagggacacgagcattaacatttgaaaaatttgcagcctggccatgtggtagtaaagaaaagagtgttttcaggagaggaatctaagcaactacttcctaaagagattagcatgaccagtaagagagcaaggtattaatagtcaagacaatggacaaaaggcatttcagaaatctttgaggccacccatcccatcacaatcacaggagcctaggagaacagaatggttttgggggacaggcctagggcaccactgccctgtgcccctttgggtcactgttcctcacatccctacaactccagctcccactatggctcaaatggacccagctactgctggggttgctgctccagagggcacaagccatagctttggtggcatccacatggtgttaagtctgcaggcacccagaacacaagagacatggaggcttggcagctgccccctagatatcagaggatatatcaaaaagcctgggtgcccatgctgaaacctgccacataggcagagccgccagcagtgtgcaacctcagtctggaaaagcctcaggcattcaactccaacatatgaaagccacatgggctgtgcacagcaaaaacatggggacaggactgccaaggccttgggagcccaccccttgcaccaatgttcccaggatgcaggacatggagtcaaagaaaattattttggagctttaagatttaatgtctactctgctgtgttttaaagctacatgagacttgttacgccttcctactggaatggaaatgtttacccaatacctatacaaccatttttaccttggaagtaaagaacttgtttcatattttataagcttacagctgaaagtaacttactttgtgtctcagatgagacttcggactttgaacttttgaatggatgttaaaatgaattaagacttttgagactattggaaaagaatgattgtatcttttatgtgaggacatgagttttggggattcaggtgaagaatgctatgatcgggatgtctttccccttcacaggggcagattcctcatgaatagattaatgtcttcccttaaggacgagttcccactcttcgttcccatgagagctggttgtttaaaaaagcctgaaacctgtcccctctctctcttgccttctttctcaccatgtgatttctgcacactctgacttcccttcacgttctgagatgagtagaaacagcctgagaccctcaacagaggcagacactcaaccttggactttccagacatcagaattgtgagccaaacaaataatttttctttataaattatctagccttgagtattcctttataacaatataaaagggactaagacaaagaggtaatatataggaaacttttaaatttttttgcaggaataatgaaaagatgtgtgtcatatgtaggtttgtgtgtatgtgactgtgtatatctaaaagatcatttcctatgtaaactagagaacatagttggaataaagacttatggatgtaataactttcatatcctcaagcctactataaccttaaaaaggaaatgagttcagaatcaaatttaaaattcctgtagctatttagaacatcatatgtacaaggcactgtactaggaggaaattagtattattctatgctatatctgttccaggtctgtgtcatcctataacttctgacacactgtgtttttttagggtaggaggtgcttgttacaaaacagttttttgccatattattaggaacttaattaaaaattaggagtttagtccaatctccagagaatatagtgtgtgtgtgtgtgtgtgtatgtgtgtgtgtgtgtgtgtgtgtgtgttctggcaggagttctctttccaccaatctgaaatgttgcagatagtatcccaaataagaatagttatatatgcaaaatcaggtaaaggaaaaactcatgtctagttaagggacaagtaggttaaactagaggtaccagaggttaaactagatatatcagagattctctgtttcagagtagaaattattaatatttctaagattacagagttagaagataaatggaccccttgaagaccaggcctacaatttagaatttgataatagcaagaggtaacgataataggctcctgacaaagtgaaatattgagaaaatttttgagaaaaattgttttagtacattggcaaagagtaggcaaaaagatattaaaaagagaaataataactaaaaacttactagaggaatttagacataaagaaatcaagaatagaaataatttgtaaaccctaatgcttgccttcgggttggggattaaatggaaagaaaaagataaaaagaaaaaaattgaaagagattccaaagttacaacttgtttaacattcagtatagctgagaggtaaccatttggaaggaaagagaacatactcagtttttgacatgttaaatttcatgtaataaccaatgaaatgggaatgccacatagattttaatacatgctaaagaaggtaaatgttagatgaaaacttgcaaacaaaatgttaattcacatacttatatagggtaatgaaaagcacaagaatgtatgtatacataaaatggtaacttttatgttatacatagtctatcacaataaaacaaaatttaaataaaaaaatatatatatatatactgaagaaagtgggcatgaaaggtaaagtataatgggcctgcaaagatgttagatacttagacaaagtacgagtaaccaacaaatatgacgtagaaagacgagttgagtaccaatgagattagaagagtatgttttaataagactcatattagaacttcttagaagaataagcataaatccttacatctacccaaaaagtgttaatgttgataaatagggcagctaagcagaattcccagttatgatgatttaatggcccaaatcctacatccctttccaaacaccgagaacaatatctgcaaattagtatgaggaagaaccctggatcttacatttacaaacaacttgaagagtagaatttggactgatttattcaacaaaaatttattgagagctgactccatgtggagacagagcccctccttcatggagcctacagcctagtggggagacaatctttaagcaacagcaaatagaaaattgtatctgtgtcaaaagctatgaagagagaaatgtggggggtatgagagcccatactagaatatgtggccaaattatatagataatgaatttttttaaataaggaagtgatatctgacttgagaatcttacagatattaataagaagaaaaaatgaagagaaagtcattccaggccaaggagagacaacttacaaaattgtgttacaaatatatgaggctaaaagatcagtgggcgaagaacatacaatgatggaaattagtttcatgctattaccattataataaaaatgtacagttagatttttactgacaatgtaaaggagtggagagcaccactattatagcattattctacagttgtttcaattgcctgtgacataatgaaaaaggaataaaagtaaaagaaggcccctgtcttctctgcccctgagattctggtcttctgtgttgtctgcagcagtagtgcaataatacttctatcatgtgtcattttccattactcagctatcacattgtacaagttttcataatgattgattttctttaaggaaacaacaaaaatgtgatcaattttatgtgtcctgagtctccaatgcttctgtccaaacatcaggtgctgcctttaagttgtctcacaattttctcagtgtttcccaaattcctctggtttaattttcaccattgaaccaaagtgcatttctgtaattctagcaaaccaatattcacacaaagaatacttcctatcaaaagaatacaaatgccaataatctaaaataaatagagtttaaaagtgttaatctgtacatggataacttacttgctttgtgtcagatcaactacaatgagatctttctccagaagtaccacgacagcatagggttcttgaaattctacaagtaaaaataaaaaatgaaaagttttcatattgtatatactataaaatcagcaaaattgcatttcctttatccctatacaaatattatttaaatgatgtgagaagaccaaactataagccaaagtaagaagtaacaaagagcacttaaaaaaagttgtgcttctcaaatttaatattaagatcactagaaagaacaagaaaaaaattaaaagtagcatagtataaatatatctcaataatcatggagtgatgataatattggattatgtgaagacagtgaatctgtcacctgatctcacaaacatttatcttattcttccataacctttgtattttagatctgattttatgcctacaaggagatgtactgagggaatagtatctctgcttctctgggatatgacatacattcacatctgtataagagcaacactgcttataataaaaagtttactttcaattcaatgtaatttgaaatatatttataggttgtgtaaccatatcatatcaatctggttcaacttttacataacaaagctcttcagttgccatggactcccagattgaaggccacgtaacctgaacatgccaagataaacaaagcatgcaaccacaggtagaacctaagtgcccagaacaaggaacagggactaaaattaagaagcatacattgcatggtaggctgcaggatccgatcagatagagccctggtatcacaccagggaaggatccagtcagagcatacctcctggcatcatcctatggcaagatccaatcagatcatgacttattacgcgctgactataaaaccttcctcaatccccagcttggggagacagatttgacatctgtctccttgccagttcactcatgataaacctttcttgctgcaaaaacctgctgcttcagtgtttggctttccattgtgcatgggcaaatggacccagtttagttcaataacaaagttggtgacccaaatcggacttctctaaatcctttcaggacagttttgactgtggctcaccagctccatatcagggatgggatccacttgagggtctgagcagctgtccaggtgttttactcagtgatttactcttggttcctgtctccccagcatggccctgctgacttttggtgcttttactttcatttttgcagcaaaaagaagttttgaattttggaacacattttttttcctcttttttatttttattttgtggtgaattaatctctgtacaagtgaccaactctcagctcctttcttatcaacttccactagggagccttgtcaacctccacaagggggctttgttaggggatttcaactttgattgaaagaagaataagggggtatgttcacgtggcactcgattataaatttgactaggaacttgactgggaacttggaacttggatgtgtatatgtatatgtgtcaagtttagggtttgtctagtcacttgtttatgttgttaagaccactcagcaaaccctgaaggagctgccagtggcagccaaggaggcctgactcagggtcgctgtctgttccagtcaactagactgagtaaattatttgcttgattattggctggaggtcaaccttccccatccagaatggactaaagatgtctgaagcttgcagggacaagtttgagccttgtctgtttgctccctttgagtggatcaaactcagagtccaaaatgctgtggtttgtcttgtttgattggctttttctgtttctgtttgtattctgatatgagcagtaatatttggcttaagcagcagttaatattttgatggcacagaaacagcctaattagaaaattatttaatagagggactacattgctccctccagcccttttaggtactcctaggagactagaggatacccaacccattgggtgattcactgggaaggaatctccataagtaccacattgcagacccaaaatatatatatctctttctagtgcagggccttgctctagccatctgagataaacttccaagcaaaatggggaatgttaattgtagcaggactccagcagcacaagccataaaggtacaacagtggccaaagaaaatgcttcttcctttcttgtggtccttaaagccttcaggcaatacactgacattaaccccgaacatccaggtaacctgagagttttatcagtcacagtgcccctggcataagaggaaaactacaaaaagtagaaaaggtgttgggaatatcaatatctccagtagtcgagattgcttttaaggcatttaatcatcttattcaagtccaggaagggcaaaagcaatgcgacatgagacaacaagctatgctgcttgctgtggctcttggccacaaccagtcgaggcacaagatggagcatgctaggaaaaacaaatggccatgggtaagacccttagggaccccactgctggccaaaatggccgtacactcttgaggccacaatgtgcatattataaacaagaggaccattggaaatgggagtgccctaatcatcctggcaggtagagaaagaagctgcccattaatcagcccaccagataccagtttctgatagtgattaaaaataatgggactggggatcctctatgatctaggaaccttaggtaatctaatgtagaaaagagacttattggctttctaattgattctagagctaaccttcttcaactagctcctctcttcctgccggtccgcccgactactttgctactctggtttctctaaaattcagtaaggggcttcagccacgtggaacagaaaaatttaaactaaaattgttagtttaacagtgacgaagtttgaatctaactatcccttttaactagtgagttatgcctgacatatggctaaagctttatttaaagcttgatcattatttgtatctggctgcatgtacaagtctggttgtatttgtctatggtaccaaattggcttataaatagatgagtattcataaattaagcaaataagaccaggaacttttcaaattcatgtttgacttagaaatcttttggcaaatgggactagtctaagattgttgatttgatgggaatgcctgtgtcctctgaattatttgactttaaggtcattacttttataatatttgcccgatatagacaaatacaaccagacttgtatctggctgcatgtacaagtctggttgtatttgtctatggtaccaaattggcttataaatagatgagtactcataaattaagcaaataagaccaggcacttttcaagttcacatttgacttagaaatcttttggcaaatgggactagtctaaggttgttgatttgatgggaatgcctgtgtcctctgaattatttgactttaaggtcattacttttataatatttgcctgatatgcagttgtataaaataagtaatagataaataatttggaatgatgactagtttgtctattatctcagttttcataagtaatctcagcacactgctaaaataaataaataaaggtaaatgggataaatagctataaatttttatgtaatttgaaatcctaaattaaataatagatgactcattaaatgtacaagtcattttcaaatacgataaaaactgaaacaaactgctgaacataaatagggttgtccttggcttcttaaatttaatagaaagactagaaatactaagagaaagactaaatatgcataaaaatatgttatagggaaacacgtttttctgacaattataaaatggctcttggccaagcatggtgactcaagcctatactctcagcactttgggaagctaaggtgggaggattgtttgaggccagaagtttgagaccaccctgggtaacaaggcaagacatctctacaaaaaaataaaataattagccaggtatggtgacatacacttggagtttcagctacttggggggctgaggtgagaggattgcttgagcccaggagtttgaggctgcagtgagccatgatcatgccactgcactctagcctgggcaaaagggcaagaccctgtctctaaaaagtaaaaaaatgaaaaataataaaaataaaatggttgttatctgttaaataatgatatgtaacaggcaaatcaagattttgtgtttcctatgtttttaataaaatttaaggttaccagaagctaaaaattccaattgatatataattctgtatataaagtatgccaaagtaaggtgtgtttaataagagaaaaaaatgtcttttattgagaagaaataactttttctaattcaaaggttatctaaagggagtgtcaaaatgtggatttaggaaggaaatagaaacaagatagaaaggaactgtaaatagtagagacagaaagagatgtaaggagagttatagatgtaaagataagagaataattttgcatgagatagtcttgcatggtaaatctttttcctagagcgatataactggttacttaagaagaaagaggaagtatagagtgaggcagggtgtctcagtaatccatagatggtctgagtaaatcatgataaggttcatgaatgggaacttatgaaggaaattctgggtgtgattaagctggctataattaaaagaaattatttgtgacagtctttctaaagaataaactttgatgttaaaatacactgatacaaagtttaaaaatctggtcacctatgttaaaacaacaaaggtttcctttcttttcttttcttcttttcttttctgagacggagtctcactctatcgcccaggttggagtgcagtggcatgatctcggctcactggaacttccacctttcaggttcaagcgattcttctgcctcagcctcccgagtagctgggattacagatgtgtgccacctcacccagctgatttttgtatttttagtagagacgggggtttcaccatgttggccaggctggtcttgaactcctgacctcaggccatccactgcctcagcctcccaaagtgttgggattacaggcatgagccactgcacccagccaacaaaggttcaattgcttttagtaagattgcaagaggttttgatttttaattctgaaatgtgtttaacaaccatcctctgaattacaaacaaatttctatttctgtcacatttcttcctgagaactacctagtttctctggttttacttttatcctgaaggtccagaaaagcaatgttttactcggtataacttgattgagtactcttggcttttctttatgtgtctgaattattttatgtaaccagaacttcatatgctcttgctaagaaccacatattccttgctcaaggaatatatgagcctaggaaacacagattctgtgttttaccaaggaaacttcctgtacttcatgctgtccttgttgggttttgactacttcagaaaactgaactttacaagggttaaggtttttacatccatgtaactttctgtattgcttttgaaatcttctgatttttactcttactttggttgaataagtaactattatttagcagtgaacaccattctattaaagaaagtagtttttgaaatttttaacatctttggcaggtctctccaggacccaaatcttaagttaagccttttggcctaaaattaattttacaattttccacataggccccctgaagagcctcaaagggtttatctctcatcttgtacagatattaaatgattaggtttatttggtaaataatacaggaagtgctgtcaaattatgaatggtgtttaacttcccttaagttatatttgtggctttattaaaaagtgtaaaattgtataaaattctgatatgccaagatatgtgccataataatgattattatgttaaatgattgtatgccaccaaaatatctaaattgccttgtcaattggaaattctcatcatatctttggctatgattgttctgggtttttgtcatccacagttattgttttaaattctctagaagtatttgcaatgggctatagtccaaaattgctaatcaaaataaagaaaaaaaaattttttgaaacagtcttactctgttccccaggctggagtacagtggtgcaatcatagatcgctgcagcttccatctcctgggctcaagcttgatcctcctacctcagcctctggagtagctaagactacaggcgtgtaccactacacccagataatttttttgacttttagtagagacagatcttgctatgttgtgcaggctggtcttgaaatcctgagctcaagctattctcccacacagcctcccaaagtgctgggattacaggtgtgagccactgcacctggccaaccaaacagaattatttaaatgaaattaagtaattgataaggataatgtttttgttgcttaaatgttttgttttccaaattcaaggaaattttctgacataagctatctatagcttgcaatattttggtaaagtatcctctattgaacaaaggtggaagcatttgctttttctccctacttgattccttaaaattcagaagctataaatgaatattcttatttttatttatataagttaaataaaaatcttatctctcttgaaagcaggatacaattgggaacattggttatattaccaaggtatgaactgaaatgttatatgtaaaaatgtgcctaaaatgcttgtcttcaagagttcctagttttacagtgagtaagtaaaaactatcacttcctggtaggcccaagaaccttaagactataagtaaaatctaatgcctgacttggtctggccatctagcttcaagaggttctaatagctgagatttcttatatgatcaatgtggagaggaaaagttatgcttctaagaaaagcaaaattgtatctgttattagattgtaacattgtgcattgccctaaagtccttgttatttggctatagactggactagattctgaattctcctaagatcctctaacatttggttataactaaatcctgatggagtcccctagccctctttccccagtccagactagggatgctctcgggacattcaggggatttccccttttaaaatctaaccaactaggtgaattaaaatatcagaattggacacaaactgtacccataggatactatagtctccttgtctcaaagaagttgatgttgtctcttcttttgtaaaagccacaatgaaaatagtaacggggcccccctcactgtctgtattccacactctaatggggctctcctcaattcacatcacaaagagtctagcaaactatgcagttctttttctatcctcacctccccttaccatgacccaatataacttgcttaattctgccactttacttatctttcctgatgtcaggtctgtccaacaggcagaactgcatgctcttactagacatgtcttttagccaaaggtaaaacagccaattatttatacagatggcaagcatgccttgggatagctcacaaccttagtatctgtgtgaaatatatccacaataccatattggaaaaccatttcgtggcttcatggaccacttcacattaccaaaaagtccctttgaggcacggcaacaatatttttttcagctccctgtctctcaaggatatcagtatgtactagttacagtttacatgttttagcattgcattgaagccttctattgtcaacaggccatagccatggcagtagctaaggccctgttggaaaatttataccaacctgagaagtctctcaagggcttcataatgcacgaggaactcattttacagggcaaattattgaaaacatttgtataatttggcctatttatcaacatctccattgtgcttaccacctctagtcctctggactggtgaaacagaccaagggaataataaaagcccaattggcaaagatttgtggtgtggcatttagcctgccatggcccaaggccctttctttagtcctccttaaccctggcatgctttcaatgttcctttgtagagttctaaattcatctaggtggtcagggtagccaacacatttgtggtagtctctaatctttactgatccccttccaattaggactcctcattggcagtcatttctgcttgtcccattggcctctgtacagctcctgggaaagaattttgtacaaatctgccaggtccatatttccttctcccaaaaagggtgaaataatattagtgttatctcaccaggagatctggcctcagaaatggcttttaccctaattctcatctctcgagttggcctcactaacagtgctcaccctcctctccacgagctaccaattgtgccccgagagtcctggggcacaatccaacaccaatgataatcccagagattacagctggggatgtactcaaggatgtgatttacatggagaataatcctctaatgaaggagctagattaggaaagtttctggggtcctggtttggactaggttctgcttgaggtggatatatggtcagaaacctttccggcactgtcaatagagttaaagtacatctcctagcttttgacaagtgaaaagttccatcctcattaccacattgctaaaaaacaaagatttttatatatggcttgaaagtgaataggaatggttacattgcatttatgcttcattgaaccttattagaaattgtcctaacatctctaccaacgtgcagaaatttatatacacacagaccacacattctcaatttctattgctcacacatcttcttcctcaaggcttttcataggaggcattttcctaagctcagctgttggtcttctgttctctcttcctacattctttcattattcatttttgtaactccaaaaaacacttatattctgatgattcacaaatattgtaagacagtttctctcttcttctgttccctaaacaactctactctctcataatcagacttacctttctctctttccaaaaactgctattactatgcatgaaaccacgactatttaacttaaaaattaatacattatttatactctgaaccatacaactcagcacttaattaaggtctttcattacttaaacttaacaagtcataataatctcactcatctgaccagattttatgcaatttgacatcagagattagtttaatactttatctgtatgctcaacaagttcttgtagtactggggccatagaatgattcaataattatttgacaattaaaaacataagtaaattgtctgtcctagtaactttggaaataaagtgctacattgattattatttaatatcaatttatcccatcttttaaatgtgagactaaataatttaaagtaagttaatacatataatagtggaactcacaacatatatatttttatagtttaagaagtatgctcacttaaccttccagtagtcatgtggagaccatattactattctctttctacaaacgataaataaaactaataaatgtaaagtgacttgcccaaggtcacctagctagtaagtggcagagctaaatcataacctcacatattctgtccccaagtccagtgctctttctcttatatctgcatattctgtcttaaaaatatagtaatgtatacacacatactatgttgttgtaacatgactcatatttccttttttatgttttcacttttctcactttttagatttatttatttatttatctatttatttgtttgagatggaatctcattatgttgcccaggccagtcttgaactcctggactcaaacgatctgcctgccttggcctctcaaagtgctgggattacaggcatgagtcaccacacctggccacattattaaaatatttcatcattattagatttcattatacagattgcatataagtttagactagttgttatgtttacaaaaagtctttatattcagtataataaaaatatataagcatttctcctcccaaagtcccttctgactattctcaaaattttaaaaagtcattaaccacacatctgcattactagagtaatcagaggtgctgcagttgcatctgaagcaaagccagatgtgaaacagatgcagcaccaccacagttacagattactgatatcaggtaagtgctttaactttgattggctttgggatggaattgatggagctggtctgagagaggctattaagagacctcagcttccccaagtgatttcaccctggacccttatcagaccctcccagctcagcttccaccatctaatcaaagtttaaagcacttacctgatattagaacctgaaatgccagcattgctgtactacatctgtgttatttccagtttctcaagtaggtacagttgcagaacctgttccagcacttgtagctcacagcgttataccacagtagacatctgaaaatatttaaccttaattttgttagaaacttgtcatttccaaaatgattttcaacattaatagtttcattttagttacttaccatttggatagggcgtttcacataaagttagaaattcaacaataggatgatccatttcaagtactgtaattgcttttccatgcatgatggttaaacttggtcttctacaagctttgtcataggacagcccaccagagaatattatgaatggttcgctacataggaaaaaacatgaatgagactcagaagtcctttaaaatgacacaaagtcacaggactgaacctataaagaacaggttttgttgcataccatataacatgacagacagcaaaaaacttgcccggctcaaaatttctcattcaataacctactattctaccatttcccactttctagatgtacattctcacattaaatttactaatggaccagtctaaacatattggggtaggtttggggaaaggcagtgagcttggaggaaggtagatgtgctcactgactctcaaaaggacatcttcacatactttacttggttcccaaactctaaatcactatcattggaatattagtctatgtcagaatatcagattaattagctggcctatggggcctaaaatctgtacaagagaaaagagacaaattttaatataaaatgaaatgtgacagtggaaagctcagaatggcagagggtaaaataagaattctagataatggagtttctgtgaaaaaagagtaaagataaaaagatggagaaagctaatatgtaagagaaggatagctaatcaaagataaattgccttttctattttacttgtggccagtctatagatcagtataaactccatatatcttgctcaactaactttaaacaagatttttggtctgttgctttataagatataattagataatagagtggggttaagattcctctaaaacattatagctatctgaaaattatgaagtcatttcacagtttttcatttttcatttctcaaatcaatacttacatatctctagtgtatgtgtacaaaagaaaaagtgtgttagcaagaaatattttcaagaagtaagaagtaaataccaaattgaaaatattcttttctaatttttttaaagacctagaggcttttattgtatcaaattatttgagaatataatgctcatctacataattcacttacatcctatttgctaagctgaagaatctacttgtttctagaaatcgctctgtaagatttccttttctcttccgttttgtactgtgtgtggcgccaaacattatcagtgggacatttactaatcttatgctggctatataaccaaaaagggttttttttttaacaaagcttctatacaaacatacatataaaatgtgtgtattattttctatttataattctatcagtattctgacataaatatttgagttataagcaaaataaacaaaaatactctaacttattttacttcagttgatttgagtaatagtcttgcaccagtgatttgatatggtaaatgaccaacctactaatggtgccattaaaaagcacatttgttatttctataaaatgtatatttatattattaataagatttatccagatttaaaaagcatttctaatatagttatttatgaaatagtgtgggggtttttacctttgttttttgctctgttttgcaaaaaaaggccacgacttaagagaatgtagtatcttttcataatattaataataatattaagcttaactacctactattaatattaataaaggccatacgtatctatttttttcctgtgtaaaagtaggtgaatttactctcatcccctaatactaatccaagcataggataaggagcaatttaccccccctgcttttttgtatatacattggaaatatgtcctctctaatattgaaaggaagtaaaacctcttctgctctaattacgactctgcatcagaatactctgggtctgaagttagttgttaatatatatgcatttatctataaactactgagtgactgaataaaaagttatttcctcaggaaagtgctcagggaaccactcatggttaactgtactaaatatttaattatcatctttaatcctcataagcaatgtcctcattttattaatgaggttaaataacagctaagaagcaacaaccaaaagaaaattgagatctaccagactccaaagcctatgattctaaacactcctatatattgcctctagtaataaatagctaccatttactgagtgcttaccatgtggcatatattgtgctatgtgtatatataaagtaaattttgtgtaatcctcacaacaaccttgatgaagaaagtactattagtcccattttatacatgaataatctgggattaatgcagattaaacttgtccagggtcaagcagctagtgagtaccaggacaaagattcaaacccagactcaaaagcccacatttttcatttttagtttaatgtttcccaaactgtggaatacaacttggtagttgtcgagcagaaaaaaattaattttgataatttgataatttgcacttgcaaaaccatatctcctttcaggaattttgcatttcatagcatatgttaaaaattctgagaaatcatatggcaagcaatccaatttacttttatagaattcaaaatttctcacatttattagattacagatcctttttattgcatgaatatcattagtgattaaaggaacacagttgtttgataatgctgtaccacactaaatgttgtaccagcctaaactgtgtcaggtgttatttaatacaaagattctattaagggatacctatcagatggattcttataaaagaaataaatgaccatatacttgaaatgtcctcatacttaaagaaagcattaataaaaaataacaaattatggatacataacttggatgaatctcaaaggcattctgctgagtgaaagaagctaggcttaaaaggttacataatatataaccacttatatgtaacagtctccaaaaggcaaaactatagtgatggagaacaaatcagtggttgccaagggttaggagttggggagaggagtgactataaagggacagaaagtgagagttgtgggaaatgatggaaatattctttatttttattgtggtgatagttttagaaatcatacatgtgtttaaaacatgaaactgtacaccaaaagaaaaatagttaattttactgtatgtataatttgtaaaatacatacagaaaacagcattaaaagtttgttccaatgaaggcaacaagattaaacaagttgtgtaacataataaatattaaatgctaacatatattgagtatttatgatattctaggcatcgcatgcagaattttacatgcattcttttatttaatccttataacatcccaatgagataactactattattatctccatttaacagatgggtatattgaggcttggagaacttaattatacataaagcctatcagtaggctgccgtaataggaacagattaaaagattagcagaaaataattttctttagcttaagagcacctaataattctagtggtagtcagtatataaatcaatattcctatcttgaagaggataaaattattaagcctagaggccatcttagttggagtgtcagtaagcaaattggtgattggggataaatgattcccatatacatagctgtttatctctggaaatgtaaagcaagtctgcgattggctggtctgacataaaaccgagaagaaaacacatcccttacatgtgctacctatgcagtccagtaagagaccctactgctgcagcttatatggtagagctcttcctaaggttcctgtttctgtgacagccatcctgacttataactgtacagtttctgccgtgtaatagttggagcagggatatagctatataattccacttcctaactgtggcccattttgctgtggcaataaattttagtattcttaacctcactgcccctctgcttcttaacctccttgtgtgctaagctccagaggtaataaagtagtaatcacaaaaaacagaagcaatgtactaatgtacacaagtaggtgggatgacagtaattatcatcaataatatgattgtttcacattacaaatatgaagattaatttacacatagttgtattattgactagcaaaaaattaagaatacttgaataattttaactacatgaaataatgatgtcaataataatagtaactactaagaaacccactatgtgtcttcatcaaactgaggacattacaggctgtatccattatttcatttaattctcatgaatatcatagtgagacaggtattgttgataaggaaactaaactttaagagagttaattaaactttgcaaggtcacacaactgtcttacttcaaagccaatgattttaattattactttacactgccttaacttgagtttttgatttctaaaaatatgttctcttcactttcatctcttcctccctttgcttggcaacatctgatcatccttaaagtcccatctcaggcatctccttgccaaagaattttcctgatttctctcttcatggttctcctccctactcccttcaaggctgggttaggtgctctttttgtgtgctcccatagcatatctctataaaagtaacttccatgttgtatggaaatcactagtttatgtccttgcctctactgctagaatataacaaattcaaaagcaagcagtaatcttatttcagaacatcaaacaaatcgcatttgtttagtaatatagtaataactactaaataatactatatactatatattatatagtatattatactagcatatatagtatattatatataagctagtagtatatagtaatatatatactatattatactatgtatagtatatagtaatatatatactatattatactatgtatagtatatagtaatatatatactatattatactatgtatagtatatagtaatatatatactatatcatactatatatagtatagtatattattactatatattacattacattatactacatattatattatactatatagtatattatatattatactatatattatattatatactgtatgtagtgtatatatattatatatagtatattatatagtatattatactatagtatatatattatactatatattatatagtaatagctactaaactatagtagtaactactaaatgttgttttaactgaattaagctgaatactgttgagaatccaacagaaatacaaattgtaaagacctccaagcaataaaatagacgtcataaagtccaggcatgtatacattgtcatggaagaacctctcaggcattatatggatctatttgctctcattttacaagtttggctttcaagtttcttagtctacagaaaatcaaagattggatactagtagataacacaataaagattataagaaatcctcatggctcaaaactgaaggaaagagaaaagatttttaaaaatatatgaaagtgaagcggaatctgggctagcaagatggccaaataggaacagctctggtctgcagctcccagcgacatcaacacagaaggaagtgatttctgcatttccaatggaggtacccagctcatggaactgggaatgattagacagtgggtgcagaccacggagggtgagcagaagcagggtggggcatcacctcacccgggaagtgcaaggggttgaagaacttcctcccctagccaagggaagccatgagggactgtgctgtgaggaacagtgcattctggcccatataccacgcttttcccatggtcttcgcaacccgcagacaaggagattccctccagtgcctacgtcatcagggccctgggtttaaaatgcaaaactgggaagccatttgggcagacaccgagctagctgaaggagtttcttttcatacctcgctggcacctggaatgccagcaagacagaaccattcacttcccaggaaagggggctgaagccagggagccaagtggtctagctcagtggatcccaaccccacagagcatagcaagctaagatccactggtttgaaattctcgctgccagcacggcagtctgaggtcgatctgggaagtgccagcttggttgggggaggggcgtcaccattactgaggcttgagtaggtggtattgccctgacagtataaacaaagccaccaggaagttcgacctggacagagcccaccacagctccacaaagaggctgtagccagagggcttccctagattcctcctctctgggcagggcatctctgaaagacaggcagcagccccagtcagggcttatagataaaactcccatctcccttggacagagcacctggcggaggggtggctgtgggcgcagcttaagccgacttaaacattcctgcctgctgactctgaagagagcagcagatctcccagcacagtgctcgagctctgctaagggacagacagcctcttcaagtgggcccttgacacccatgcctcctgattgggagacacatcccagcagtgatcgacagacaccacatacaggagagctccagctggcatctggtgggtgtccctctaagacgaagcttccagaggaaggaacaggcagcaatctttcctgttctgcagactccagtggtgataaccaggcaaagagggtctggagtgaaccttcagcaaactctagcaaaactgcagcagaggggcctgactgttagaaggaaaactgacaaacagaaaggaatagcatcaacatcaacaaaaaggacatccacacaaaaaccccatccgaaggtcaccaagaccaaaggtaaataaatccatgaagatgagacaaaaaagtataaaaaggctgaaacttccaaaaaccagaaagcctctcctccaaaggatcacaactcctcaccagcaagggaacaaaactggatggagaatgagtttgatgaattgaaagatgtaggcttcagaggtgggtaataacaaaatcctctgagctaaaggagcatgttctaacccaatgcaaggaagctaagaaccttgaaaaaaggttagaggaactactaactagaataaccagtttagagaagaagataaatgaccttggagctgaaaaacatagcacatgaagcatacacaagtatcaatagccaaattgataagtgaaagaaaggatatcagagattgaatatcaacttaatgaaataaagcatgaagaaaacattagagaaaaaagaatgaaaaggaatgaacaaagcctccaagaaatatgtaactatgtgaaaagaccaaacctatgtttgattggtgtacttgaaagtgacagggagaatggaacagagttggaaaacactcttcaggatattatccaggagaacttccccaacctagcaagacaagccaacattcaaattcagaaaataaagagaatatcataaagatactcctagagaagagcaacctcaagacacataatcgtcagattcactaaagttgagatgaaggaaaaaatgttaagggcagccagagagaaaggtcgggttacctacaaagggaagcccatcagactaaaccagttctctctgcagaaaccctacaagccataaaaaagttggggccaatattcaacactattaaagaaaagaattttcaaaccagaatttcatatccagccaaactaagcttcataagtgaaggggaaataaaatcctttacagacaagcaaatgctgagagattttgccaccacaaggcctgccttacaagagctcctgatgaaagtactaaatttggaaacaaaaaactggtactagccattgcaaaaacataccatattgtaaagaccatagacactatgaagaaactgcaacaactaatgggcaaaataaccagctagtgtcataatgacaggatcaaatttacacataacaatattaaccttaaatgtaagtgggctaaatgccccagttaaaagacgcagactggcaaattggataaagagtcaagacccatcagtgtgctgtattacggagacccatcttatgtgcaaagacacacataggctaacaataaaaggatggagaactgtttaccaagcaaatggaaagaaaaaaaaaagcaggggttgcaatcctaatctctgataaaacagtcttaaacaaagatcaaaaaagacaaacaagggcattacataatggtaaagggatcaatgcaagaagaagaggtaactatcctaaatatatatgcaaccaatacaggagcacccagattcataaagtaagttcttagagaccaacaaaaaaaaacttagactcccacacaataatagtgggagactttaactccccactgtcaatattagacaggtcaatgagacaaaaaattaacaaggctattcaggacttgaactcagctctggaccaagtggacctaatagacatctacagaactctgcaccacaaatcaacagaatatacattcttctcagtgccacaatgaacttattctaaaattgatgacataattggaagtaaaacattccccagcaaatgcaaaagaacaaaaatcataacagtctttcagaccacagtgcaatcaaattagaactcaggattgagaaactcactcaaaaccacaaaacaacatggaaactgatcaaccttctcctgaatgacaactgggtaaataatgaaattaaggcagaaataaataatttccttgaaaccaatgagaacaaagacacaatgtaccagaatctctgggacacagctaaatcagtgtttagagagaaatttatagcactaaatgcccacaggagaaagcaagaaagatctaaaattgacaccctaacatcacagttaaaagaactagagaagcaagagcaaacatattcaaaagctagcagaagacaagaaataactaagatcacagtgcaactgaaggagatagagacatgaaaaacccttcaaaaaaaatcaatgaatccaggtgcgggtttttgaaaagattaacaaaatacatagacaactagccagcctaataaataagaaaaatgagatgaatcaaatagacacaataaaaagtgataaaggggatatcatcactgatcccacagaaatacaaactaccatcagagaatactataagcacctctatgcaaataaattagaaaatctagaagaaatggataaattcctaaccacatataccctcccaagactaacccaggaaaaactcaaatccctgaacaaataagttctaaaattgaggcagtaattaatagcctaccaacccaaaaaagcccaggaccacatggatttacagccgaattctaccagaggtacaaagaggagttggtaccattccttctgaaactattccaaacaatagaaaaagagagactcctccctaactctttttatgaggccagggtcatcctgataccaaaacctggcagagacacaacaacaacaaaatttcaggccaatatccctgatgaacatcaatgcaaaaatcctcaataaaatactggcaaaccgaacacaacagcacatcaaaaaacttatccaccacgatcaagttggcttcatacctgggatgcaaggttgattcaatgtatgcaaatcaataaacgtaatccatcacataaatagaactaactaatgacaaaaacctcatgattatctcaatagatgtagaaaaggcctttgataaaattcaacaccccttcatgctaaaaactctcaataaactaggtattgaaacatatttcaaaataataagagctatttatgagaaacccacagccaatatcatactcaatgggcaaaagctggaagcattccctttgaaaacaggcacaagataaggatgaggtctctcaccactcctattcaacatagtattggaagttttggccagggcaatcaggcaagagaaagaaataaagggtattcaaatagaaagggaggaattcaaattgtctctgtttgcagatgacatgattgcatatttagaaaaccccattgtctcagcccaaaatctccttaagctgataagcaacttcagcaaagtctcaggatacaaaactaatttgcaaaaatcacaagaattcctatacaccaataacagacagagagccaaatcgtgagtgaacttacattcacaattgctacaaagagaataaaatacctaggaatacaatttacaagggacatgaaggacctcttcaaggagaactacaaaccactgctcaaggaaataagagagaatacaaacaaatggaaaagcattccatgctaatggataggaagaatcaatatcacgaaaatggccacactgctcaaaatactttatagattcaatgctatccccctcaagctaccattgactttcttcacagaattagaaaaagctactttaaatttcatatggaagcaaaaaagagcctgtatagccaagacaatgctaagcaaaaagaacaaagctggaggcatcatgctacctgacttcaaactatactgcaaggctatagtaacgaaaacagcatgcttctggtatcaaaacagatatacagaccaatggaacagaaccgagtcctcagaaataactccacccatctacaaccatctgatctttgatgaacctgacaaaaacaagcaatggggaaaggattccccatttaataaatggtggtgggaaaactggttagccatatgcaaaaaactgaaactggaccccttccttataccttatataaaaattagcacaagatggattaaagacttaaacttaagacctaaaaccataaaaccctagaagaaaacctaggcaatatcattcaggatgtaggcatgggcaaacacttcataactaaaatactaaaagcaatggcaacaaaaggcaaaattaacaaatgggatctaattaaagtaaagatcttctgtacagcaaaagaaactatcatgagagtgaacaggcaacctacagaatgggaggatatttttgcaatctatccatctgacaaagggctaatatccaaaatctacaaggaacgtaagcaaatttacaagaaaacaacaaacaacctcatctaaaagttggcgaagtatatgaatagacacttctcaaaagaagacatttatgcggccaaaaaacatgaaaaaaagctcatcaacactggtcattagagaaatgcaaatcaaaaccccaatgagatacaatctcatgccagttagaatggcgatccttaaaaagtcaggaaacaggccagcatgttggctcactcctgtaatcccagcagtttgggaggctgaggcggtcggatcacgaggtcaagagatggagaccatcctggccaacatggtgtaaccctgtctcttctaaagtaaatacaaaaattagctgggcatggtggcacatgcctgtagtcacagttactcaggacgctggggcaggagaatcgcttgaaccccggaggcagaggttgcagtgtgctgagatcacgccactgcactccagcctggtgacagagcgagactctgtctcaaaaaaaaaaaaaaaaaaaagaaagaaaaaaagtcaggaaataagagatgctggagaagatgtagaaaaaataggaatgcttctttgaaaactggcacaagacagggatgccctctctcaccactcctattcaacatagtgttggaggttctgaccagggcaatcaggcaggagaaagaaagaaagggttttcaattgggaaaagaggaagtcaaattgtccctgtttacagatgacatgattgtatatttagaaaaccccatcgtctcagcccaaaatctccttaagctgataagcaacatcagcaaagtctcaggataaaaaatcaacgttcaaaaatcacaagaattcctatacaccaataacagacagagagccaaatcgtgagtaaactcacattcacaattgctacaaagagaataaaatacttagcaatccaacttacaagggatgtcaaggacctcttcaaggagaacttcaaaccactgttcaacaaaataaaagaggacacaaacaaatggaagaacattccatgcacatgggtaggaagaatcaatattgtgaaaatggcaatagtgcccaatgtaatttatagattcaatgccatccccatcaagctaccaatgactttcttcacagaattgaaaaaaactactttaaagttcatatggaaccaaaaaaggtcccgtattgccaagacaatcctaagccaaaagaacaaagctggaggcatcacactacttgacttcaaactatactacaaggctacagtaaccaaaacagcatggtactagtaccaaaacagagatatagactaatggaacagaacagaggcctcagaaataataccacacatctacaactatctgatctttgacaaacctgacaaaaacaagaaatggggaaaggattccctatttaataaatggtgctgggaaaactggctagccatatgtagaaacctgaaactggatcccttactcacaccttatacaaaaattaattcaagatggattaaagacttaaatgttagacctaaaaccataaaaaccctagaagaaaacctaggcaataccatgcaggacataggcaggggcaaggacttcatgtctaaaacaccaaaagcaatggcaacaaaagccaaaactgacaaatgggatctaattaaactaaagagcttctgcacagcaaaagaaactaccatcagagtgaacaggcaacctacagaatgggagaaaatttttgcaatctactcatctgacaaagggctaatatccagaatctacaatgaacttaaatttacaagaaaaaaacaaacaactccatcaaaaaatgggcaaagggtatgaacagacacttctcaaaagaagacatttatgcagccaaaagacacatgaaaaaatgctcatcatcactggccatcagagaaatgcaaatcaaaaccacaatgagataccatctcacaccagttagaatggcgatcattaaaaagtcaggaaacaacaggtgctggagaggatgtggagaaataggaacacttttacactgttggtgggactgtaaactagttcaaccattgtggaagacagtgtggtgagtcctcaaggagctagaactagaaataccatttgacccagccatcccattattgggtttatacccaaaggattataaatcatgctgctataaagacacatgcacacgttatgtttattgcagcactattcacaatagcaaagacttggagccaacccaaatgtccatcagtgatagactggattaagaaaatgtggcacatatacaccatggaatactatgcagccatgaaaaaggatgagttcacgtcctttgtagggacatggatgaagctggaaaccatcattctcagcaaactatcacaaggacaaaaaaccaaacactgcatgttctcattcataggtgggaattgaacaatgagaacacttggaaacaggaaggggaacatcacacactggggcctgtcatggggtggggagagaggggagggatagcattaggagatatacctaatgtaaatgatgagttaatgggtgcagcacaccaacatggcacatgtatacatatgtaacaaacctgcacgttgtgcacatgtaccctagaacttaaagtataataataaaataaaaataaaaaataaaaaaacataaaaaaataggaatgcttttacagtgttgttgggagtgtaaattagttccaccattgtggaagacattgtggcgattcctcaaggatctagaaccagaaataccatttgaccgagcaatcccatttctggttatgtatccaaaggattataaatcattctactataaagacacatgcacatgtatgtttacttcagcactattcactatagcaaagacttggaaccaacccaaatgcccatcaatgatagattggataacgaaaatgtagcacatatacaccatggaataatactgtgcagctattaaaaaagacaagttcatgtcctttgcagggacatggatgaagctggaaaccatcattctcagcaaactaacaccggaacagaaaaccaaacactgcatattctcactcataattgggaatcgaacaatgagaatacatggacatagggaggggaacatcacacaccgtggcctgttgggggttgtgggggttgggaggctaggggagggatagcattaggagaaatacctaatgtagatgatgggtgcagcaaaccaccatggcacgtgtataactatgtaacaaacctgcactttttacacatgtattccaaaacttaaagtataataaactatatataatgtgaaaaaaacccataaaataataccacaagctgctaggaacagttaatatagtgtcctgcaccttaataatccttgaagtgcaataccacataagaaatattgtaaataatgttgaacctgaaaactcaagcaaagcttaaactataagtaatatttcaagaggcaaaatatatgtcatatatttcatatttccattaataatgattaaatttgaaactttctaatactttagttataatggtataaaacagtgggtttttttgttattagtatttttttactattacactttaagttctagggtacttgtgcacaacatccaggtttgttacatatgtatacatgcaccatgttggtgtgctgcacccattaactcctcatttacattagatatatctcctaatactatccttcccccctccccccaccccatgacaggccccggtgtgtgatgttccccttcctgggtccaagtgttctcattgttcagttcccacctatgagtgagaacatgtggtgtttggttttctgcccttgggatagtctgctgagaatgatggtttccagcttcatccatgtccctacaaaggacatgaactcatccttttttatgactgcatagtattccatggtgtatatgtgccacattttcttaatccagtctatcactgatggacatttgggttggttccaagtctttactattgtgaatagtgctgcaataaacatacatgtgcatgtgtctttatagcagcatgatttataatcctttgggtatatacccagtaaggggatggctgggtcaaatggtatttctagtactagatccctgaggaatcgccacactgtcttccacaatggttgaactagtttacagtcccaccaacagtgtaaaagtgttcctatttctccacatcctctccagtacctgctttttcctgactttttaatgatcgccattctaactggtgtgagatggtatctcactgtggttttgatttgcatttctctgatggccagtgatgatgagcattttttcatgtgtctgttggctgtataaatgtcttcttttgagaaatgtctgttcatgtccttcacccactttttgatggggttgtttgattttttcttgtaaatttgtttgagttcattgtagattctggatattagccctttgtcagatgagtagattgcaaaaattttctctcattctgtaggttgcctgttcactatgatggtagtttctttcaccagacagaagctctctagtttaattagatcccatttgtcaattttggcttttattgccattgcttttggtgttttagacatgaagtccttgcccacgtctatgtcctacatggtatcgcctaggttttcttctagggtttttatggttttaggtctaacatttaagtctttaatccaccgtgaattaatttttgtataaggtgtaagtaagggatccagtttcaggtttctacatatggctagccagttttcccagcaccatttattaaatagggaatcctttccccatttcttgtttttgtcaggtttgtcaaagatcagatagttgtagatgtgtggtgttatttctgagggctctgttcaaacagtgttcatttttatcagtgaatgcatagtaggctaaagagatatctatatatagataaaataacaggttaaaaatgagcataattttgtactattaaaattttaaaagagcagttataaacaaacattcagtatacctatgataccaagaaaacattataaaatgttcatattattaatataaactaggattatttaatttgaattaaaataaatttaatgtttaggcaagatttattatggtaattctcaatgagtgtattgccactaattattattgccaagtaaaaggaacttgttgatttataggatatggctacttttttttctttttgagacagagtctcgctctgttgcacaggttgaagggcagtggcagcatcttggctcactgcaacctccacctcctgggctcaaaggattcttgtgcctcagcctcccaagtagctgggattacaggcacatgccaccatgcccagctaatttttttgtgtatttctagcagaggcagggttttgccatgttgcccaggctggtctcgatctcctgacctcaggtgatccacccgccttagcctcccaaagtgctggggttacaggcgtgaggcagggcacccagccggatatagctactttaaacacaaaataatattttactaaatattattatttttgtatttttcaacaccttaaaatttagtactttttattacattaatatacacaactttatctttcgaacaaactgtaatcttccaacttcagaatgtaagatcttaaagtatagacacttggttatgtatttaagtctttcacatgcaatattaacgggcacattgcttctgcttaataaatcctgctacttgtaatatgcatggccagaagtcctttactgttaaaattaatgtgtataatacttgtctaaatgttcattaagaatcctgaaataattaacacttgtaatttataataatcataataataatcatcagagatatgtctatgagacaagtcaattatgttaatattgaggattcagttgtctttacaattttgtaaaactttaaacaatatcttaacattaaaggtcatctgcattttttgtctctgcttcgtatccctctttccctaaagtaaaaatgcatacctgtttttgcaggtcttgtattctactttaagaattggtttacaagattcagattttcttccttctctttgactttttcctaaagaaaaaaaatatttaattgaatctaatttaaattatattcatctgtaagaattaaaaaatttgactaagggaatttaaagataaaggaataataatgttaattctatgtttgtcataataggataaacttatatctatgaatcccaatatttttgttgaatttgtaaacaatctttagagttgcaataattgtctgctatataattcataaaattacctgtaaaattatataacttttatcactttacatccttcacacataaatctaatttcatgtggagttattttaattattaaagtttgaagacaaaataagtttagaattgaagaccacacatacatacttatctacataatgaaatgtattactattgctatggtttgaatgtgtcccccaaaattcatgtgttggaaacttaatccccaatgcaacagtattgagaatgagacttttaagaggtgattaggacatgggggctttgccctcatggatgaattaatacagttattgtgagagtgggttggttatcatgggagtgggtttctgatgaaaggattagctcagcccccttccctctcttgcacatctctcaacatgtgataccttccaccatgttataacacagtaagaagtccctcatcagatgttgcccctcaatcttggcctttacagcctccagaatcataagccaaataaacctctattgtttatacattgcgtagtgtgtagtattctgttacagcaacatgaaacagactaggacaacaatgacaatccatactaggatcaatattttatctataatacatgcaaactcctttcatacagagaaatacttgctatttaaagcatacaatgaactattaaaattattctatcaaatacatttttaaaaacttccattagacaatgaacacagatactacatttcatgatttttaaaaatcattttaatgatgtattcattttgcataaaacaaaaatgataatttcttataggggatgggttattctgtttagactccctaagattttgaataaaggatcaaaaagagaaggaaatagaaatgaagctacttctgcacataacatgcttatctttctagttatgctttcagtttaattctttctcattttggttaaactggcttgtgttctgaaatgcaatatttgtttcttttttattttcagtaagtacccttatttattcttgtattaccacagttgtttatctattacatagatacctatgtaatacattatctattacatagatacctatgtaatacattgtttatctattacatatctattacatagaagtttacatgcatatagctttaaattttcagattagcttcagaataacataagcatatccaaataggatatcaagatagctttattcaacttgtttaaagggcaaggaattaacaaacaacaaatcaatatctgctgcttggcatgctttctgaaattgccttttctttattttaccctatgttgactaaagaagaaacaaataataaaaaattgaccataatcattcacactgtacaaaaatatacatactgtgccatatgtaaaatagaattgctaacattatatgtagatcatgatgtcttagaaagagaaaacttttgctcaggaacttgtctgaacaatagtctttttttttgagacagagtctcgctctgtcacccaggctggagtgcagtggtgcgatcttggctcattgcaacctctgcctcctgggttcaagtgattctcctgcctcagcctcccgagtagctggaactacaggtgtgtgccaccatgcccggctaattttttgtatttttagtagagacagaatttcaccgtgttagccaggatggtctcaatctcctgacctcgtgatccacctgttctcagcctcccaaagtgctgggattacaggcatgagccaccaagcccagccctgaacaatagtcttaagattgagaaatagatggttggagattactggctttggtaatgatgtgggaatagagagaaataaaaaagtgacacagccaggggagaggtccactccccttagtttatatgtcttttccatccagcacttcactaaattgtcaaaccattaattgaacaaaacagtatatttgcagttgtttgtacatattaaagcatttttaatcaatatacatcagagtcatcaatttatttcagtgggaaagaataattatataattacttgttaagttaacattttccttcaatttccaactctaccaatttattcttgggagagaatttttgtgctttgattatacttattgactgtcactaattgaaacatgattaaatgtcatgttgtgtatcacaacattatcgacaattatatttcttactattcctaacattcagagtagtgtaccaagtgttagggtattaaacaactgaattccagaggcttaaaattcactgtattaaaaaataagtaaaaatgacaatatgaagtactataatgaaatgagtgataagcataaagtgctgtagaggttgagattaaaactggttttactgacaggccaatttgactagattaaaagatttgtgaagggaaataggggaaataatgttaatgaggtacaaaatagccaatcaatggcaatctctaaacttattttcagtatagacaatggagagttatgagaagctttcaagttagggagtgatgagtgtaaagcaatgtttcaaaaatattaatgtgtcttcatttaatagagcaattttgagggtgtaagagactgatgctggaagaacacagagattattgcaatagcacagaaaaaaaaaaacagaaaaaaagaatgaaggagtatgaacaatctcaaagaaatatggaatactgttaatcacaagaatatacataattgaaatagaagaaaaggaaagaaaggaatacaaacattttttaaaataatggttgaaaactttcctaaatttgaaaaaaacattatctatgctttaagaatttcaataaactccaagtaggataaagaaatctctactcagaaacatcccagtaaacatgcttaaaagaaaaaaaaataaaacaccttgaaagcagtgtgtacaaaagaaccctattaagattaacagctaacttttagaaacaatggaggctgaaaggcaatggaatgtgatatgacatatttaaaatagtagaagaaaaaaagtctgccaaccaagagtcttatgttgagcaaaactgtctttcaaaaataaagatgaaataaagataatttcaagataaacaaaaactgagagaatttgttgataacagagctatcttacaaaaaatactaaaaaaagtccttcaggctgaaagaaagtgacccagcaagtaatttaagtctacacaaagaacagagtaccagtaaaggtaactaggtagataattacaatgacataattgcatatgtattctccaaccacctcttaactgacttaaaaatcaattatataaaacaatatgtatataattgtattgtgagatctgtatatatatttgccaataacaagaaaaagaaggtgggtgagagcaaagctgtattggaacaaggaaaagataccagttggtaatttgaatctacagcaacaaatgaagaaaaccaaaaatgataagcaaaaacatcaatgtaacagattctgtgaatatatacttgatctacattttttgtcaacattcttaaaagacatacaattatataagatttaataataatttaatttaaataatgtattattggatttgcagcacatatagatataaaacatataacaaaaaattggacaaaaaaaggagaagaagagcagagcacaatggctgattcctgtaatcccagcaatttgggaggccaaggtaggtggatcacctgaggtcaggtgttcaacaccggcctggccaacatggtgaaaccctgtccttactaaaaatacaagaattagccaggtgtggtggcacgtgccggtaatcccatctactcgggaggctgaggcacgagaatcccttgaacccaggagggggccaatattcaacattcttaaagaaaataattttcaaacgagaatttcatatccagccaagctaagcttaataagcacataaataaaatgctttccagacaaggcaaatgttgagggatattgtcaccaccaggtctgccttacaagagctcctgaaggaagcactaaatatggaaaaaaaaaaacaaccagtaccggccactgcaaaaacatacaaaaatataaagaccaatgacactgtgaagaaactgcatcaactaatgtacaaaataaccagctagcgtcataattataggatcaaattcacacataacaatattaacatttaatgtaaatgggctaaagtctccaattaaagacaagacagataaattggataaagaatcaagacccatcgatgtgctgcatcaggagacccatctcacatgtaaagacatacttaggctcaaaataaaaagatggaggaatatttaccaagcaaatggaaagcaaaaaacagtaggggttgcaatcctagtctctgataaaacagactttaaaccaacaaagatcaaaaaaggaaaagaaggacattacataatggtaaagggatcaatgcaacaagaagtgctaactatcctaaacatatatgctcccaatacagtggtatccacatactgggatatgagccaatataccacccagattcataagacaagttcttagaggactacagagagacttggactcctgcatagcaatagtgggagaatttaacaccccactatcaatattagacagatcaacaagacagaaaattaacaaggatattcagtacttgaacttggccctggaccaagaagacctaatagacatctgcagaactctccaccacaaatcaacagaatatacattcttctcagtgccacataacacttattctaaaattgaccacataattggaaacaaaacactcctcagcaaatgcaaatgaatggaaatcataacaaacagtctctcagaccacagtgcaatcaaattagaactcaggattaagaaattcactcaaaaccacacaactaatggaaattgagtaacctgctcctgaatgactactgggtaaataacaaaattaaggcagaaataaataagctatttgaaaccaatgagaacaaagagagagacaacgaacccagaatctctgggacacagctaaatcagtgttaagagcagaatttatagcactaaatgctcacatcagaaagcaagaaagataaaaaatcaacacactaacatcacaatgaaaaaaactagagaagaaagggcaaacaaattcaaaagctggcacaagacaagaaataactaagttcagagtggaactgaaggagacagagacatgagaaactcttcaaaaaatcaatgaatccagaagctggttttttgaaaagcttaacaaaatagactgctagctagactaatgaagaagaaaagagagaagaatcaaatagatgcaataagaaatgataaaggggatatcaccactgatcacatagaaatacaaactaccatcagagaatactattagcacctctatgcaaataaactagaaaatctggaagaaatggataaattcctggacacatacaccctcccaagactaaaacaggaagaagttaaatcctggaatgtaccaataacaagctctgaaattgaggcagtaattaatagcctaccaaccaaaaaagtccaagaacggatggattcacagccaaattctaccagaggtacaaagaggagctggaatcattccttctgaaactattccaaacaaaagaaaaagaggcactcctccctaactcattttgtgaggccagcatcatcctgataccaaaacctggcagaaacacaagaaaaaaagaaaatttcaggccaatatccctgatgaacatcaatacaaaaatcttcaataaaatactggcagaccaaatccagcagcacatcaaaaagcttacccaccaagatcaagtcgacttcacccctgggatgcaaggctagctcaacatacacaagtcaataaacataatccatcacataaacagatcgaatgacaaaaaccacatgattatctcaatagatgcagaaaagggcctttgatcaaattcaacatcctttcatgctaaaaactctcaataaactaggtattgatagaagatatgtaaaaataataaaagctatttatgaaaaacccacagccaatatcatactgaatgtgcaaaagctggaagcattccctttgaaaactggcacaagacaaggatgcggtctctcaccactcctattcaacatagtattagaagttctggccagggcaatcaggcaagagaaagaaatgaaaggtattcagttaggaaaagaggaagtcatattgtctctgtttgcagatgacaagattgtatatttagaaaaccccatcatctcagcccaaaatctccttaagctgataagcaacttcagcagagtctcaagatacaaaatcagtgtgcaaaaatcacaagcattcctatacatcgataatagacaagtagagagccaaatcatgagtgaacgcctattcatagttgctacaaagagaataaaatacctaagaatacaacttacaagggacgtaaaggacctcttcaaggagaatgacaaaccactgcgaggtaatcagagagcacacaaacaaacggaaaaaaattgtatgctcatggataggaagaatcaatattgtgaaatggccatactgttcaaagtaacttatagattcaatgaaattccaacaagctacctttgactttctttgcagaattagaaaaatctactttaaatttcatatggaaccaaaaaataacccgtataggtaagacactcctaagcaaaaagaacaaagctggaagcatcacgctacctgagttcacactatactacaaggctacagtaaccaaaacagcatggtactggaaccaaaacagatatatagaccaatgaaacagaacaaagacctcagaaataataccacacacctacaaccatctgatcttcaacaaacttggcaaaaacaagcaatggggaagagattccctatttaataaatggtgctgggaaaactggctagcgatatgcagaaaacagaaactggacctactccttacaccttatacaaaaattagctcaagaagaattaaagacttaaatgtaagacctaaacacataaaaaatcctagaagaaaacctaggcaataccattcaggacataggcatgggcaaagacttcatgactaaaacatcaaaagcaatggcaacaaaagccaaaattgacatatgggatctaatcaaacttatgagtttctgcacagcaaaagaaactatcatcagagtgaacaggcaaccaacagaatgggagaaaatttttacaagctatccatctgacaaaggtctaatatccagaatctacaaggaacttaaacaaatttacaagaaaaaaaaaccatcaaaaagtgggagaagtatgtgaacagacacttctcaaaagacatttatgcagctaagaaagatatgaaaaaaggttcatcatcactggtcattagagaaatgcaaatcaaaaccacaatgagataccatctcacgccagttagaatggctattaaagagtcaggaaagaacagacgctggtgagtctgtgaataaatagaaatgcttttacactgttggtggcagtgtaaattacttcaatcaatgtggaagacagtgttttggttcctcaaggatctagaaccggaaacaccatttgacccagcaatcccactcctgggtatatatccaaaggattataaataattctactataaagacacatgcatgcatatgtttattgcagcactattcacaatagcaaaaacttggaaccaacccaaatgtccatcagtgatagactggattaagaaaatgcggcacatatacaccatggaatactatgcaaccgtaaaatagaatgagttcatgtcctttgccgggacatagatgaagctggaagccatcattctcagcaaatttaaataggaacagaaaaccaaactctcactcataattgggagttggacaatgagaacacatggacccagggaggggaacatcaaatactggggcatgctgtggggtaggggtgatggggagggagagtattaagacaaatacctaatgcatgcggggcttaaaacctagatgatgggttgacaggtgcagcaaaacaccatggcacatgtatacctatgtaacaaacctacacattctgcctatgtatcccagaacttaaagtaaataaataaataaatagaaattaaattttttaaaaatattcatttaatgttaaaaaatcagtaaaggaggagtacaaggaaaaaaggcatgaacatatggaaaataaaaactaaatttacagacatcaatctaacagtaccaacaataacactaaatgtgaattgattaaacattccaatcaaaaggaagatatagtatgactgcacaaaacaagcaaatagtatccaactatatgctttctacaggagacacgctttgatcaaagatacaaaaaagtttaaagcaaaccataaaaaaggacataacatggaaatagcagccgtaaggaatcttcagtggctatactaacatctgactgaataacaaacgaaagaaacgaaaaatactttgtgaagaatgaaacgaagatataacatactaaaaactccagtatgcagcttaagcaatgctgagaggaaaatttatagccataagcaagtatgttaaagaaaggaaaagagaagaaaagaaaagaaaaaaaggctgagcccagtgggttgcacctgaaatcccagcactttgggaggctggggtggaaagattgcttgagtccagggtattgagaccagactgggcaacataggtagaccctgtctcaatcaatcaatcaatcaatcaatcaatcaatcaataatctgggcatggtagcaaaggcctgtagtcccaactacttgaaaggctcgggtgggaggatcacttgagccagggaggttgaggctgcagtgagccgtgatccatgatcatgccactgcactcctgcctgcgtgacagaatgggaccctgtctcaaaacaaggaaaaaagaaaacaaaattacctcaaatcaatatcctcaccattcacattaaaatatagaaaaataaaaaaaactaaactgaaagcaaacagaaaaaaggaaataaagattatagcacaaattaatgaagtattaaagaaaaaatatatacaaaagcaaataatctaaaagttggttctttgaacacagataaaaggaaagacctccgtttttatggactgggagaattaatattgccgggtgcggtggctcatgcctgtaatcccagtactttgggaggtcgaggcaggtggattacctgaggtaaaaagtttgagaccagcctgaccaacatgatgaaatcccatctctactaaaaatacaaaaaaaaattagccaggcatgtcatgggaggctgaggcaggagaattgcttgaacccgggaggcagaggttgcggtgagccaagattgtgccactgcactccagcctgggtgagagagaaagactgtcttaaaaaaaaaaaaagaattgatattgttaaaatccccatgctatccaaactgatctatagattcaatgaaatccctatgaaaataccaaagaaatactctacagaaatagaaaaaaaaaatcctaaaattcacatgaaaccacaaaagaccccaaatagccaaagtactattgaacaagaataacaacgctggaggcatcccactttctgatttcaaaatatattacaaagttaagtgggactgaatcaaactaaaaagcatttgcagagcaaagaaaacaagcaatagagtgacaaatgtgtcccagggggcagggccagggcttggatcctactgtgtgcccagtctccttctcttccctgcaggttccaccattctcccatcctaatggcatcattagggattggaaagcaggtattgttgatgggaaccaggagatttgagctgtagtcctgtccccactgctcactgacttcgtccttggatgagtcacgcaatctattagtttactaaagcagaaaatgtgatacacatacacacactaattcactgaaatattattcagcttttataataaagtaaatcctgacatttatgacaacttggatgaacctggaggatattatgctaagtgaagcaattcagacacagaaagacaaatattgcattatctcacatatgcaaaagtggaaatacacttagagaaagtagaatggtggttgcgagggtgaagcaggggaggggagaaggaagaaaatgacaattatgtgacgcgatggatgttaatttatataaaatattgagttgtataccttaaatatattcaatttttgtctcataattcaataaagctggaaaaaagcagcttctttgaaaaggtcaaaacggttgacaaaactttagctaggttgaccaagacaagaagagaaactaacattattataatcaagagcaaaggccgggcacggtggctcacacctgtaatcccagcactttgggaagccgaggtgggcagatcacgaggtcaagagatcgagaccatcctggccaacataatgaaatcccgtctaaattttgtattaaaaaaaatacaaaaattagctgggcatggtggcgtgtgcctgtagtctcagctactcgggaggccgaggctgaagaatcacttgaacgtaggaggcggaggttgcagtgagccaagatctcgccactgcactccagcctggtgacagagctagacttcatctcaaaaaaaaaaaaaaaaaaaaaaaaagagtgaaaagagggacctatctcagagaattaaaaagattgtaatggagtattattaataacaatattccaacaaatcagataacctgtacaaaatggataaattcctagaaaaacacaaactatcaaaactgactttagaagatatgaatagacaaaacaagtaatgaaatgaatttgtaattggaaaaatctctcacaaagaatagcccaggcccagagggcttcactgttgaattctacccaacatttgaggaagaattagtatcaatttttcacaaaccctccaaaaaaaacagaagaggaggaaacacttcccaactcattctatgaggccacttcttatagcagtctgttatgtcctctaaatgttaaacacaaagttactttttttttttcaaggcagggagtgcagtggcatgatcatagctcactgcagcctggaactcctgggctcaagcaatcctgggctcaagcaatcctcctgcctaggcctcaaaaagcactgaaaaataaataaataaaatatgataaaatggaatcttattcaccaataaataggaataaagtactcatacgacatgaatgaatcgtgaaagaattttgttaagagaaaaaagccagtgacaaaatgccaaatattgtatggttttattgctttgaaatgactataacaaacaaattcatacacacagagactaaagtagttattgcctagggttgcaaggtttggagagaaaggggagtaactggtaataggtacgtggtttctttttagagtaatgaaaatatcgtaacattgattaggtgatggttacaaacttcactgaatatactcaaaatcattgaatcatatactttaaatgggtaaattgtaggatatgtcattttatttcaataaaacatttactaaagcaagcatctaaaatttctttttattattattattattattatatgttaacttctagtgtacatgtgcacaatgtccaagtttgttacataggtatacatgtgccatgctggtttgctgcactcattaacttatcattaacattaggtattctcctaatgctatccctccccctgacccctaccccatgacaggcccccatgcatgatgttccctgtcctgtgtccaagtgttctcattgttcaattcccacctatgagtgagaacatacggtgtttggttttctgtccttgtgatagtttgctgagaatgatggtttccagcttcatccatgtccctgcaaaggaaaatggactcatccttttttatggctgcatagtattccatggtgtatatgtgccacattttctaaatccagtctatcattgatggacatttgggttggttccaagtttttgctattgtgagtagtgccacaataaacatacatgtacatgtttctttatattagcatgatttataatcctttgggtacatacccagtaatgggatggctgggtcaaatggtatttctagttctagatccttgaggaatcgccacacagtcttccgcaatggttgaactaatttacagtcccatcaacagtgtaaaagtgttcctatttctccacatctctctagcacctgttgtttcctgcctttttaatgatcgccattctaactggtgtgagatggtatctcattgtggttttgatttgcatttctctgatgaccagtgatgatgagcattttttcatgtgtctgttggctgcataaatgtcttcttttgagaagtgtctgttcatatcctttgcccactttttgatggagtcgtttgtttttttcttgtaaatttgtgtaagttcttcatagattctggatattagccctttgtaaaatgggtaaattgcaaaaattttctcccattctgtaggttgcctgttcactctgatggtagtttcttttgctgtgcagaagctctttagtttaattagatcccatttgtcaattttggcttttgttgccattgcttttggtgttttagttatgaagtccttgcccatgcctatgtcctgaatgatactgcctaggttttcttctagggtttttatggttttaggtttaacatttaagtctttaatccgtcttgaattaatttttgtataaagtgtaaggaagggatccagtttcagctttctacagatggctagccagttttcccagcaccgtttattaaacagggaatcatttccccattgctggtttttgtcaggtttgttgaagatgagatggttgtagatgtgtggtgttatttctgaggcctctgttctgttccattggtctatctctctgttttggtaccagtaccatgctgttttgattactgtagctttgtagtatagtctgaagtcaagtaccatgatgcctccagctttgttcttttggctttggattgtcttggtaatgtgggctcttttttggttccatatgaactttaaagtagtgttttccaattctgtgaagaaagtcattgatagcttgatggagacggcattgaatctataaattaacttggggagtatggccattttgatgatattgattcttcctatccatgagcatggaatgttcttccatttgtttgtgtccccttttatttcctagagcagtggtttgtagttctccttgaagaggtccttcacatcacttgtaagttgtatgcctaggtgttttattctctttgaagcaattgtgaatgggagttcactcatgatttggctctctgtctgttattggtgtataagaatggttgtgatttttgcacattgattttgaatccagagactttgctgaatttgcttatcagctttttttaattatactttcggttctaggctacatgtgcacaatgtgcaggtttgttacatatgtatacatgtgccatgttggtgtgctgcactcgttaactcatcatttacattaggtatatctcccaatgctatccctccccccatcccccaccccaaaacaggcccctgtgtgtgatgttccccaccctgtgtcccagtgttctcattgttcaattcccacctatgagtgagaacgtgctgtgtttggttttctgtccttgcaataatttgctgagtgatggtttccagcttcatccatgtccctgcaaaggacaagaactcatccttttatatggctgcatagtattccatggtgtatatgtgccacattttcttaatccagtctatcactgatggacattcgggttggagaattcttcaaatggaagaacattccatgctcacggataggaagaatcaatattgtgaaaatcaatgccatccccatcaagctaccaatgactttcttcacagaattggaaaaaaaaactatctccctatccctctccctctccctctccctctcccctttgcacagtctccctctgatgcccagccgaggctggactgtattgcagctatctcgactcactgcaaactccctgcctgattctcctgcctcagcctgccgaatgcctgggattgcaggcgtgcgcctccacgcctgactggttttcatattttttggtggagacagggtttcgccgtgttggccgggctggtctccagctcctgaccgcgagtgatctgccagcctcagcctcccgaggtgccaggattgcagagggagtctcgctcactcagtgttcaatgttgcccaggctggagtgcagtggcgtgatctcggctcgctacaacctccacctcccagccgcctgccttggcctcccaaagtgccgagattgcagcctctgcccggccgccaccctgtctagaaagtgaggagtgtctctgcctggccgcccatcgtctgggatgtgaggagcccctctgcctggccacccagtctgggaagtgaggagcgcctcttcccagcagtcatcccgtctaggaagtgaggagcgtctctgcccagccgcccatcgtctgggatgtggggagcacctctgccccgccgccccgtctgagatatgaagagctcctctgcccggccgcgaccccgtctgggaactgaggagtgtctctgccccgccgccaccccgtctgggaggtgaggagcatctctgactggccgccccgtctgagaagtgaggagcccctccgcccagcagccgccccatctgggaattgaggagcccctccgcccggcagctgccccatccgggaggtggggggcagcccccgcccggccagctgccccatccgggaggtggggggcagcccccgcccggccagccgccccgtcagggaggtggggggcagctgccgcccaccagccaccccatctgggaggtggggggtgcctctgcctggctgccccgtctgggaagtgaggagcccctgtgcccggccgccaccccatctgggaggtgtacccaacagctcattgagaaggggccatgatgacgatggcggttttgtcgaatagaaaagggggaaatgtggggaaaagaaagagagatcggattgttactgtgtctgtgttgaagggggtagacataggagactccattttgttctgtactaagaaaaattcttctgccttgggatgctgttaatctataaccttacccccaaccccgtgctctctgaaacgtgctgtgtccactaagggttaaatggattaagggtggtgcaagatgtgctttgttaaacagatgcttgaaggcagcatgctcgctaagagtcatcaccactccctaatccctagttcccagggacacaaacactgcggaaggccgcagggccctctgcctaggaaaaccagagactttgttcacatgtttatctgctgaccttccctccactattgtcctatgaacctaccaaatccccctctccgagaaacacccaagaatgatcaataaatactaaaaaaattaaaaaaaaaagggacaaaaaaccaaagcttattaaaatggacagttttccccaattaatctataaacctcagaatgccaagatgcttaaagatataatcgattacacttataagtgctttctatgaaagagagggacaggaataatgagagattgattatgaatgtacttatttataatataactgttagtgaatacatactttttatttgtttattttaagttggtcattttattcacacgcaaattattcattatggaaaaatgagtcaaatgtataatttaatgtaataaagggaatcaaataacaaacaaataaaaaaaactattttaaagttcatatggaaccaaaaaaagcccgcattgtcaagacattctgaagtcaaaagaaaaaagctggaggcatcacgctacctgacttcaaactatactacaaggctacagtaaccaaaacagcatggtactggttccaaaacagagatatagaccaatggaacagaatagagccctcagaaataataccacacatctacaaccatctgatctttgacaaacctgacaaaagcaagaaatgaggaaaggattccctgtttaataaatggtgctggggaatctggctagccatctgtagaaagctgaaactggatcccttccttacactttatacaaaaattaattcaagatggattaaagacttaaatgttagacctaaaacagtaaaaaccctagaagaaaacctaggcaataccattcaggacataggcatgggcaaggacttcatgtttaaaacaccaaaagcaatggcaacaaaagccaaaattgacaaatgggatctaattaaactaaagagcttctgcacagcaaaagaaactgccatcacagtgaataggaaacttaaagaatgggagaaaatttttgcaacctactcatctgacaaagggctaatatccagaatctacaatgagcttatcagcttaaggagattatgggtgaagacaatggggttttctaagtataaaattcatgtcatctgcaaactgggacaatttgacttcctcttttcctaattgaataccctttatttctttctcttgcctgattgccctggccagaactttcaaaactatgttgaataggagtggtgaggcagggcatccctgtcttgtgccagttttcaaagggaatgcttccagtttttgcccattcagtatgatattgactgtgggtttgtcataaatagctcttattatttggagatatgttccatcaatacctagtttattgagagttttcagcatgaagggttgttgaattttgccaaaggctttttcttcatctattgagataatcatgtggtttttgtcattggttctctttatatgctggattacgtttattgatttgcgtatgttgaaccagccttgcatcccagggatgaagcccacttgatcatggtggataagctttttgatgtgctgctggattcagtttgccagtattttattgaggattttcacatcgatgttcatcagggatattggtctaaaagtcttttttttttttttgctgtgtctctaccaggctttggtatgaatgaaggctttgccttcatttcgttaattactcagtagtcattcaggagcaggttgttcagtttccatgtagttgagcagttttgagtgagtttcttaattctgagttctaatttgattgcactgtgttctgagagacagtttgttgtgatttctattcttttacatttgctgaggagtgctttactttcaactatgtggtcaatatgggagtaagtgtgatgcggtgctgagaagaatgtatattctattgatttggggtggagagttctgtagatgtctattaggtccacttggtgcagagctgagttcaagtcctggatatccttgttaattttctctcttgatgatctgtctgttactgacagtagagtgttaaattttcccactaacattgtgtgggagtctaagtctctttgtaagtatctaagaatttactttatgaatccgggtactcctgcattcggtgcatatatatttaagatagttagctcttcttctttcagtgatccatttaccattatgtaatgcccttctctgtctctttgttggtttaaagtctgttttatcagagagtaggattgcaaccgctgctttttttttttctttccatttgcttggtaaatattcctccatccctttattttgagcctatgtatgtttttgcacatgagatgggtctcctgaatactgaacaccaatgggccttgactctttatccaatttgccagactatgtcttttaattgggacatttagcccatttacatttaaggttaacattgttatgtgtgaatttgatcatgtctttatgatgctagctgattattttgcctgttagttgatgcagtttattttttttctttttttttttatcattcatggttcttttttctatttttcattttttatttttattatattttaagttttagggtacatgtgcacaatgtgcaggtttgttacatatgtatacatgtgccatgttggtatgctgcacccattaactcttcgtttaacattaggtgtatctcctaatgctatccctcccccctccccgctccccccaccctacaacaggccccagtgtgtgatgttccccttcctgtgtccatgtgttctctttgttcaattcccacctaagagtgagaacatgcagtgtttgtttttttgtccttgcaatagtttgctcagaatgatggtttccagcttcatccatgtccctacaaaggacatgaactcatcattttttatggctgcatagtattccatggtgtacatgtgccacattttcttcatccagtctatcatagttggttccaagtctttgctattgtgaatagtgccaccataaacatacgtgtgcatgtgtctttatagcagcatcttttattatcctttgggtatatacccagtaatgggatggctgggtcaaatggtacttctagttctagatccctgaggaatcaccacactgacttccacaatggttgaactagtttacagtcccaccaacagtgtaaaagtgttcctatttctccacatcctctccagcacctgttgtttcctgactttttaatgattgccattctaactggtgtgagatggtatctcattgtggttttgatttgcatttccctgatggccagtgatgatgagcattttttcatgtgtcttttggctgcataaatgtcttcttttgagaagcgtctgttcataccctttgcccacttgttgatggggttgtttgtcaatgcaaaaatcctcagtaaaatactggcaaaccgaatccagcagcacatcaaaaagcttatccaccatgatcaagtgggcttcatccctgggatgcaagtctggttcaacatatgaaaatcaaaaaatgtaatccagcatataaacagaaccaaagacaaaaaccacaggattatctcaatagatgcaggaaaggcctttgacaaaattcaacaaacctttatgctacaaactctcaataaattaggtattgatgggatgtatctcaaaataatcagagctacctaagacaaacccacagtcaatatactgaatgggcaaaaactggaagcactccctttgaaaatgggcacaagacagggatgccctctctcaccactcctattcaacatagtgttggaagttctggccagggctatcaggcaggagaaggaaataaagtgtattcattaggaaaagaggaagtcaaattgtccctgtttgcagatgacatgattatatatctagaaaaccccattgtctcagcccacaacctccttaagctgataggcaacttcagcaaagtctcaggatacaaaatcgatgtgcaaaaatcacaagcattcttatacaccaataacagataaacagagagccaaatcatgagtgaactcccattcacaattgcttcaaagagaataaaatacctaggaatccaacttacaagggacatgaaggacctcttcaaggagaactacaaaccactgctcagtgaaataaaagaggatacaaacaaatggaagaacattccatgatcatgggtaggaagaatcaatattgtgaaaatggcaatactgcccaaggtaatttatagattcaatgccatctccatcaagctaccaatgactttcttcacagaattggaaaaaacaactttaaagttcatatggaaccaaaaagggcccacattgccaagagaatcctaagccaaaagaataaatctggaggcatcatgctacctgactttaaactatgctacaaggctatagtaaccaaaacagtatggcactggtaccaaaacagagatatacaccaatggaacagaacagagccctcagaaataataccacatatctacaaccatccgatctttgacaaacctgacaaaaacaagaaatggagaaaggactccctattcaataaatggtgctggcaaaactggccagccatatgtagaaagctgaaactggatcccttacttacaccttatacaaaaattaattcaagatggattaaagacttacatgtcagacctaaaaccataaaaaccctagaagaaaacctaggcaataccattcaggacataggcatgggcaaggacttcatgtctaaaacaccaaaagcaatggcaataaaagccaaaattgacaaatgggatctaattaaactaaagagcttttgcacagcaaaagaaactaccatcagagtgaacaggcaacctacagaatgggagacaatttttgcaatctactcatctgacaaagggctaatatctacaattgtagaatctacaattaactcaaacaaatttacaagttgcagtttcttcagagtgtcgatggtctttaaaatctggtatgtttttgcagtggccaggagtggtttttcctttccatgttcagtgcttctttcaggagctcttgtaaagcaggcctggtggtggcaatatcagcatttgcttgtctgtaaaggattttatttctcctttgcttatgaaactatttggctggatatgaaattctgggttgaaaattcttttctttaagaatgttgaatattggtccccactctcttttggcttgtagggtttctgctgagagatctgctgttagtccgataggctttcctttctgggtaacctgacctttctctctggctgcccttaacattttttctttcatttcaaccttggcgaatcagacaattgtgtgtcttgggtttgcttttctcgaggagtatctttgtggtgttctctgtatttcttgaatttgaatgttggcctgtcttgctaggttggggaagttctcctggataatatcctgaagagtgttttccaacttggttccattctccccatcactttcaggtacaccaatcaaatgtagatttggtcttttcacacagtcccgtatttcttggaggctttgttcatttcttttcattctgctttctctaatcttgtcttcacactttatttcattaaggtgatcttcaatctctgatatcctgtcttctgcttgatctatttggatattgatatttgtgtatgcttcatgaagttcttgtgctgtgtttttcagctccatcaggccatgtatgttcttctctaaactggttattctagttagcaatttctctaaccttttttcaaggttcttaacttccttacattgggttagaacatgctcctttagcttggaggagtttgttattacccatcttctgaagcctacttctgtcggttcatcaaactcattctctgtccagttttgttcccttgctggtagggagttgtgaacctttggaggagaagaggcattctggtttattgaattttcagcctttttgcactgtttttttctcatcttcatggatttatctacctttggtccttgatgttggtgacctttgtatggggtttttgggtgtacatcctttttgttggtgtcgatgctattcctttctgcttgtagttttccttctaacagccaggcccctcttctccaggtctgctggagtttgctggaggtccattccagaccctgtttgcctgggtatcaccagcggaggctgcagaacagcaaagatagctgtctcttccttcctgtggaagcttcatcttagtgggcacttgccagatgccagctggagctctcctgtatgaggtgtctgtcaacccctgctggaagctgtctcccagtcaggaggcacaggggtcagggacctacttgaggagactttctctttccttgctttcgtttccttgcccttccttgcttccttcctccctccctcccttccttctttctttcttttttctttctttccttcctccctcccttcctttcttttcctttctctttctttctttcttcctttctttcaatttttctttctctctttttcttgcttgcttgctgttgtaaaaggggctgtgttcttgatctgattctcagcttggtcactgttggtgtatatcagtgctactgatttgtgtacactgatttgttttgtcctgaaactttactgattcatttatcaaatctaggaactttctggattagtctttacggttttctaggtatacaatcatatcattggtgtccagcaacagtttgagttcctcttttccaatttggatgcctttcattttattctcttgtctgattgctttgtctatgacttccggtattatgctgactagaagtggtgaaagtgggcatccttgtattgttctagttttcagggcgaatgctttcatcttttccctattcagtatgacgttgactgtgggtttgtcttagacggcttttattactttgacatatgtcctttctatgccaattttgtgagtgttttcatattaatgggatgctggattttgtcaagtactttttccccaccaatttttgttttaaattctgtttatgtgatgtatcacatgtattcacccatgtatgttaagctatccctgcatcactggtatgaaactcacttgattatgatgtgtaatctttttgatatgctgttaaattcggttagctagtattttgttaaggatttttgcatctatgttcatcagggatattggtctgtcattaatagtagccttgaatgatcttttgtttttctaaggtatcggttgtaatatctctcctttcatttctaattcagcttgtttggatgctctctcttgttttcttggttaatctaactaatggtctatcaattttgtgtatcttttcaaagaaccagctttttgtttcatttatcttttgcatattttttgcttcaatttcatttagttctgcactgatctttgttacttcttttcttctgctgggtttggatttagtttgttcttgtttctctagttccttgagatgtgctctttcagactttttgatttaggcatttaatgctgtaagctttttctattagcacagctttgctttatcccaaaggtcttgataagttgtgtaatgattatcatttagtttaaataatttctaaatttaaatcttgatttccttaataacccaaagataattcaagagcagattatttaatttccatgtatttgttaatgttgaggattccttttaaaataaatttccagttttattccaccatagtctaagactatactttatatgatttagattttcttaaatttattgagacttattttgtggcctatcatatggtctatcttggagaatgttccacgtgctgatgagaagaatgtatattctgcacttgggttgaatgttctgtaaatatgtgttaagtccacttggtctagcatatagtttaagtctactgtttctttgatgtctttctgtcttgatgatctgtgtagtgctgtcagtggagtattgaagtctcccaccattactgtgttgccatctctctcatttcttaggtctagtagtaattgtttcataaattttggagcaccagtgttaggtacatatatatttaggattgtagtattttccttcttttttttttttttaactgttgttgctttaatgtctatgttgtctgatataagaatagctactcctgtttgcttttggtttacatttgcatggaatatgtttttccacccctttacctgaagtttatgtgagtccttatgtgttaggtgaatctcttaaagatggtgaacacttggttgttttttgtttgtttgtttgtttttgtttgttttttgttttctttgagatagggtctcattctatcgcccaggctggagtgcagtggcacaatctcagctcactgaagcctccaactgcctcttgggttcaagcaattctcctgcctcatcctctccagtaggtgggactacaggcatctacgaccatgcccagctaatttttgcatttttagtagagaaggggtttcaccatgttggccaggttggtcttgaactcctgatctcaagtgatctgcccaccttggtctcccaaagtgctgggattacaggcgttagccactgcgcccagccggttggtgaggttttatccattctgccattttgtatctttaagtggggcccttaggccatttacattcaatgttagtattgagatgtgaggtactactcctctcctctcctctcctctctttacttttcttttcttgatggagtttcactcttgttgcccaggctggagtggaatggcacgatctcagctaactgatacctccacctcccaggttcaggccatttacattcaatgttagtactgagacgtgagatactgttccctcctctcctctcccctcccctccccctcccctcttttctcctctcttctcttcttttctcttcttttgttttcttcttttcttttcaagacagagtttcactcttgttgcccaggctggagtgcaatggcacaatctcaggccatttacattcaatgttagtactgagatgtgaggtactgtttcctttcttcctttccttctcccctccccttccctcccttaccctctgcttcttttctcttctcttcttttctctttctctttcttttcttttctcttctcttctcttgtcttctcttctttttcttttcaagtcagagtttcactcttgttgtccaggctggagtgcaatggcacgattttggctcactgcaaccgcacctcctaggttcaagtgattctcctgcctcagcctcccaagtagctgagattacaggcatgagctaccatgcctagctaattttgcattttcagtagagacggggtttcaccatgttggtcaggctggtcttgaaccgctgaactcaagtgatccacctgcctcggcctgcccaaagtgctggtattacaggcctgagccactgtgcccagctggtgaggtactgttctattcattatgtaagttattgcctaaatacattgtttgtttgttttttcattgtattattgttttataggccctatgagcttcacggtttaaggagtttctattttggtgtattttgaggttttgtttcaagattcaaaactccttttagcatttccagtactgctggtgtagtagtggcaaattctcttagcatttgtttgaaaaagactttacgtctctccttcattaatgaagcttagttttgctggataccaaattcttggctaacaagtattttgtttaagtaggctaaagatgggaccccagttccttctggcttgtaaagtttctgctgacaaatctgctgctaatctgacaggttttcctttatgggttacctgatacttttgtctcacagctctcaagattctttccttcatcttgactttggaccacctgatgactatgtgccttggtgatgatcttttttgtgatgaatttcccaggagttctttgagcttcttgtatttggatgtctagatctctagtaaggccgggaaagttttcctcaattattccttcaaataaattttccaaactttttatttctattcttcctcaggaacaccaattattcttaggtttggccatttcacatgatcctatatttcttggagacttggttcatcttttaaaattcttttttctttgtttttgtctgattgggttaattcgaaagccttgtcttcaagctctgaagttctttcttctacttgttctagtctgttgttgaaactttctactgtattttgtatttccctaagtgtgtctttcatttccagaagttgtgattgttttttctttatgatatctatttatctggaaaatttttcatccatatcctacatatattttttaatttctttaagttcgttttcacctttctctggtatttccttgagtagctcaataatcaatctgaattctttatctggcagttcagagatttcttcttgggttggatccattgctggagagctagtgtgatcatttaggggtattagagaaccctgttttgtcatattatcagaattacttcttggttccttctcatttgggtagattatgtcttcaaattgtttttgaatttttgactggactgtttatgtacggtattttttgcttagaattactttttttccctcttatggatcatacttttatgtttatttttgcctattttgattttttatgctttagaggtgaagactttgtatcagttccttagttataaagtctctgtgcactggcttttcctgatgttggttattgtagttatgttcttggtgtgtgggtgagttcactgtctcctatggaattggaatggcagggatctcttgaagcttatctcgttctctcatggtgtacaatttatttatttattttctttttctccagtttttaatttactcagttgatgtggggaggtatcctttggtgagcacctgccccaggtcataagctttcccactgagaaagcaagcacagctttcaggccatgcccctccccatcttcctgtaatgccaagtgcccacacctgtgctcgtatctgccacagttcccatttgtgccacagattcttttaaagggggtttattcccactataaattaaaacaagattctgctggaagcttctttcaccctgtgactcttccctaattctgctggctgcctgactcttccctaattctgctggctgccttccctcagggtgcctgtaagatatagtcagggatggcttccctgggcttgagctggagactgagaatgcctatatggctcttctcaatgctacttctactttcatattttgcaccattccctaaatccattccagctccaggtaaggttaaagccttctcctgtgatctggattttcagattccccagtggagatgtgcattcagaggcagattctccccatctcacactctgcaaacttgtttccccttttattttatgttgttttaaaaagagtttttatataaaccagtagaagatcatttattttttaaattaattttattgtacttcagtgtcatcaaaagatgctttatcatgcctactttataaaatttattaagattttccttgttatttaacatatagccaattaaaaaatattccatatgtatttcaacagatgtaatgtgccatcatctttcactcactggaacacggaaacatggccaacttacctgtaagggagactagaaaatgtagttttttaaattgtagtaaaatacaactaagataaaatttaaaatcaactatttttcagtgtacagttcagtggcagtaagtagattcacattgttgtgcaagaatcaccaccattaatctccagaactttttgtcttccttaactgaaactctgaacccattaacaataactctttatatcccctttttccttaacctctggcaaccaccattctcctttttgcctctgtgaatttgatagtataggtaccttatataaatggaatcatacagtatttgtcttcttgtgcctggcttactccacttagcataatattctcaaggttcatccatgttgtagcatgttcagaatttccctatttttcaaagctgaatcatattccatttgatgtatataccacattttgtttatccagtcatctgttgaaggacaattcagttgcttgcttcttttggctcttatgaataacgtgtcaatgaatatgagtatacacatatctcaagtcactgctttcctttcttttgggcatatgcccagaagtgaaactggtagatcaaatagtaagtctacttttaatttttttgagaaaccaccatactgttttccacagaagctgtatcatttaaatttgcaccaacagtgcacaaatgttccagttgctccacattcttgctaacatttgttattttctagtttttgttttgttttgtttttgacagtaatcatcctaatggatgtgaggtggtattttcattacggttttaattcacattttcctaatgattggtgatgttgagcatcgtttcatgtgctaattggctaactggcatatcttctttgaagaaatgtccattcaaattggctgcctactttaaaaattcagttatttgtagttgttgttgttgagttgtaggaattctttacattttctggatattcaccctttatgagatatataatttagaaatatttttccccactcagtgagttgtcttttcatattgttgattgtgttctttgatgagaaaaagtaaacatatttttattttagtaggtgaattaagcctatctaaacttatggttatagttgatgacgtgggctcagccatgccatattattttacagtgtctttgttttgttcgttgttatatttaatatatgttgtgatgcttcattgtgggtgagaattctgatgccacccatattttttcctttataaatgatctagtttttgcatattggcctagcagatttttttcccctttgtcttaaaagtagaaatttcctaaaaaatgagttaccaattttcccagacacaaagtaggtctttcaaatatacagattcagagtttttatttacaaaaagctatctcaattataattttaaatattacttctgtttagtgctttgttcttctttctagatacttcaattaaacttttgttatattttctttgctgatcttctatatttattactttctgctctgcttttttttaaaaaaactccttcatttcatgtttgttttattggttgttctcatgccttttctcagtcacccttattgggttgttagatgagaacatttgttctttgtaattttatctttatttttgagatgattttgtctttttattgacttactttcttgaagtcagttgatttttatttcatatttcctaaggttttgttgcccatttctgtcataatttttaaatttttgatttgagattacttttcatatctgaaaatgcttgttattttgggagtgttaaatgacagtttttcaatacttcaccttttttttttttttttttggccagtttggctagatgtttattgattttaaccttttcaaagaactctcttttggtttcattgattatctgttttctttttgtctttaattttattgacagttgctacaatccttatttctttctttattcttgctttgggtttgatttcatcttcttgttttaagtaagccttgcttactgattttagatcttttctaatccatttggattagtgtcccatttccacttttaaaaaaatggtgtgcattctgctactcttgtgttgactgttctatatatgtcagttaggtcaatcagttgatagggttcaggctaccaatatcatgcccacttgttctatcaattacagagagattagttttgaagtttccaaatatagctgtggatttgtctatttctcctttcagatctataaatttttgtctcatgtattttgaagagctgtcttaggtacatacacagttagcattattatgtcttcttgagaaatgcctttattattattttattattgggttatgccactctttgtctctaataatattcctttatatctacattgttgaaattagtacagctacactagctttcttttggttggcatttgtaagctatatcttttttttttttactgtcaacttatctatagttttgtatttaaagtttgtttcctgtagacaacatgtagttgagtcttgcttttttcaaaattgaatgttagaatcactgtcttttaattggcatgtttaagcattaaaatgaatattgatatacttgtatttaaaatctaccatatttgttattttctatttgttctttatttcttttttccctccttttctgccttctatgggtttaattgagcattttaatggttctatttcatctccactatttacttaacatttatacttgaaaaacttttagtgattgtcccagggtttaaaatttacattttaaaacttaaaatttaaaatgtatcagcatgcttgctttgcctcttgagactgtgtgtgtttgccttgtcatatgcctcataaatttatgtggaatgttgaacatgtacaggacaagagatatggagataaatatttttatgcttggagatgaacatatttttttctaggcctttagtgtgggtgttagcattaatctagccagtagttacagtgggtttggagtttattgttgctatggttaccttcagtgcaccaaaccttcaaatttctctagagatgtctggtatttagggcatgggctatttgccagagggtttttctcagtctttgttccccagagagaatctgtctcctacagtttgtccagttgtatctattgttatttttccttgttacatgtcatatagtttaaattttggcaaactggtgtgtggacagtagatacagtgttctcttatttgtactgtgaacacagtttctttgcaggataaacttcaaaagtgtttctctccctcttccagtagttgtgcaggcctggcatatattccttccattcctctaaaggtagggttgtctgggttttttttcctgttccctttccccagctcagtgaatttcatccagtgccctaaattgacagttttgttactcttcttcctctacaggcttttgtcaataaaataaatagaggacatttggctttggctgctgtttcctttctccagcaagaaccctgaaggaagctttccctggattgactctgattttccctgtggttggttggtaaggtcatggaggaaaatgctgaaagacggtacaaagaccttatgtctgtagccccagggggctttataccttcatattagtccatattcaactttcagaaattcatttaaaaatttttgcaaaatctttctattggctttagtggcctccaagggtgtccgccctaagcaagcgaagattcaggtcttgtttctcccaaattggcacctttctctccccagatttcaaattacagttgacctttcagtaacatgggtttagactgcatgggccaacttatgcacaaacttttttctataagtatattggaagtttttggagatttaagacaatctgaaaaaacaggcagacaaacagctttagcctaaaatatcagaaaaaactaaggaaaagctatgccatgaatatgtagaaaatatatagatactagtctatattatcatttactaccataaaatatatacaaatctatcatagaagttaaaatttattaaaacttatatacacaaatatttacagaatgtacaggtgccatttgcagtcaagagaaatgcaaaaaactgtaaagatgcagtattaaaccataacggtataatattaactataatccacactacaactctgaaataatttcaaagccacctcctattgctattgcagcaagctcaagtgttgcaaatatctgcttaaaatgccatgtgaccctagtcatctcagtatgagcagttcatctctccagcatattgcatatcacagtaaaaggtgatccctccggttcttacatatttttcatcatgtttagtgcaatatcaaaaaccttaaattgcgtcatggaacccatacaaagtgccactactgatgctggaaatgttcctaacaagcagaaaaaagtcatgacattatgagaaaaaactgaattgcatggtgtatattataaatcaaggtctgcagctgcagttgtccaccatttcagacacgattcatcttgtaaagagataacacaaacttatgatattgataaatacagtacagtattctaaatgtattttctcttccttatgattttcttaataacattttcttttctctaagggtacagtatataatacatataatacacaaaatagttgttaatcgattatgttatttgtaaagcttctggtcaacagtaggctattagttgttaagtttttggagagtcaaaacttatacatagattttttactgcatggtggggagttggtgcccctcacactcatgttgttcgaaagtaaactatagttgtttgccctacaacctgagttctctgataagtttaataaaagttgttaatttaaagtttgtccagcattttttgttgttactgaagtgagagcactattctattatcattattattattattattattattattatattttaagttctgggataaatgcacaaagcgtgcaggtttgttacataagtatacacgtgccatggtggtttgctgcacccattaacctgtgatctaccttaggtatttctcctaatgctatccctctgctagccccccatcccctaacaggccccattgtgtgatgttcccctccctgtgtttccatgtgttctcacagttcgactcccaattatgagtgagaacatgcggtgtttggttttctgttcttgtgttagtttactgagaatggtttccagcttcatccatgtccttataaagaacatgaactcatccttttttatggctgcatagtattccatggtgtgtatgtgccacagtttctttatccagtctatcactgatggacatttgggttggttccaagtatttgctattgtgagcagtgctataataaacatacatgtgcatgtgtctttatagtagaatgatttaaaatcctttgggtatacacccagtaatgggatagctgagttaaatggtatttctagttctagatccttgaggaatcaccacagggtttccacaatggctgaactaatttacactcccaccaacagtgtaaaagcattcctatttctccacatcctctccagcatctgttgtttcctgactttttaatgattgccattctaactggcctgagatggtatctcactgtggttttgatttgcatttctctaatgaccagtgatgatgagctgtttttcatatgtttgttggctgcataaatgtcttcttttgagaagtacctgtagataccctttgcccactttttgatggggttgttttttacttgtaaacttgttaagttccttgtagattctagatattagccctttgtcagatggatagattgcaaaaattttctcccattctgtaggttgcctgtccactctgatggtagtttcttttgatgtgcagaagcccttttatttaattagatcccatttgtcaattttgccttttgttgccattgcttttggtgtcttagtcgtgaagttttgcccatgcctacatcctgaatggtactgcctagattttcttctagggtttttatggttttaggtcttacatttaagtctttaatccatcttgagttaatttttgtacaatgtctaaggaaggggtccagtttcagttagctggatatggctagccagttttcccaaaacaattttttccccattgcttgtttttgtcacgtttgtcaaagagcaggtggttgtagatgtgtcgtgctatttctgaggccttggttctgttccattggtctatatatcagttttggtaccactaccatgctgtttgggttactgtagccttgtagtatagtttgaagtcaagtagtgtgatgcctccagctttgttcttttcgcttaggattgtcttggctatacaggctcttttttgcttccatatgaaacttaaagtagttttttctaattctgtgaagaaagtcaatggtagcttgatggggatagcattgaatctataaattactttgggcagtatggccattttcacacgatattgattcttcttatccgtcagcatggaatgcttttccatttgtttgtgttctctcctatttccttgagcagtggtttgtagttctgcttgaagaggtcttacacatcccttgtaagttgtattcctaggtattttattctctttgtagcagttgtgaatgagagttcactcatgacttggctctctattattggtgtataggaatgcttgtgactttagcacattgattttgtattctgagactttgcttaagttgcttatcagcttaaggagattttgggctgagacgatggggttttctaaatataaaatcatgtcatctgctaacagagacaatatgacttcctctcttcctatttgaataccctttatttctttctcttgcctgattgccctggccagaacttccaacactatgttgaatagcagtggtgagagatgccatccttgtcttgtgccagttttcaaagggaatgcttacagcttttgcccattgagtatattggctgtgggtttgttataaatagctcttattattgtaagttacgttccatcaattcctagtttattgagagtttttagcatgaaggggtgttgaattttatcaaagtcctcttctgcatcgaaggccttttctgcatctattgagaaaatcatgtggttgttctcattgattctgtttatgtgatggtttacatttattgatttgcatatgttgaaccagccttgcttcccagggatgaagccaacttgatcatggtggataagctttgtgatgtgctgctggattcggtttaccagtattttattgaggatttttgcattgatgttcatcagggatattggcctgaaattttctttttttgttgtgtctctgccaggttttggtatcaggatgacgctggcctcataaaatgagttagggaggattccctctttttctattgtttgaaatagtttcagaaggaatggtaccatctcctctttgtaccctgggagaattcggctgtgaatccgtctggtgctgggttgtttttggttggtaggctaataattactgcctcaattttagaacttgtaattggtctgttcagggattggacttctccctggtttagtcttgggagggtatatgtggttaggaatttatccatttcttctaggttttctattttatttgcatagaagtgtttatagtattctctgctggtagtttgtatttttgtgagatcagtggtgatatacaatttatcattttttattgtgtctatttgattcttgtctctattcttctttattagtctgactagcggtctattttgttgatgttttcaaaaaccagctcctagattcattgatttttttgatgggtttttcatgtttctgtctccttcagttctgctctgatcttagttatttcttgtcttctgctagcttttgaatatgtttcctcttgcttctctagttctttttactgtgatgttagggtgtcaattttagatctttcccactttctcctgtgggcatttagtgctataaatttccctctaaacactactttagctgtgtcccagagattctgctatgttgtgtctttgttctcattggtttcaaataacttatttatttctgccttaatttcattatttactgactggtagtcaggagcacgttgttaagtttccaagtagttgtgcggttttgattgagtttcttaatcctgagttctaatttgattgcactgtggtctgagagactgtttgttatgatatctgttcttttgcatttgctgaggagtgttttacttccaattatgtggtcaattttagaataagtgcagtgtggtgctgagaagaatgtatattctgttgatttggggtggagagttctgtagatgtctattaagtctgcatggtccagagctgagttcaagtcctgaatatccttgttaattttctgtctcatggatctgtctaacatagacagtagagtgttgaagcctcccactattattgtgtggggcctaagtcttattgtaggtctctaagaacttgctttatgaatctgggtgctcctgtattggttgcatatatatttgggattgttagctcttcttgttgcattgattcctttaccattatgtaatgcccttctttgtctcttttgatctttgttggtttaaagtctgttttatcaaagactaggattgcaactcttgctttttctttttttccactttccatttgcttggtaaatattcctccatccctttattttgaacctatgtatatcttagcacctgagatgggtttcctgaatacagcacactgataggtctttattctttatccaatttgccagtctgtgtcttttaattggggcatttagcccgtttatatgtaaggttaatattgttatgtgtgaatttgatcctgtctttatgacgctggctgtttattttgcctgttagttgatgcagtttcttcagagggtggatgatccttacaatttggtatgtttttgcagtggctggtactgattgttcctttccatgtttagtgcttccttcaggagcacttgtaaggcaggcctggtggggacagcatctttcagcatttgcttgtctgtaagtgattttatttctcctttgcttatgaagcttagtttggctggatatgaaattctgggttgaaaattcttttctttaagaatattgcatattggtccccactctcttctggcttgtaggatttctgcagcgagatctgctgtcagtctaatgggcttccctttgtgggtaacctgacctttctccctggctgcccttaatgttttttccttcattttaaccttggtaaatctgacaattgtgtcgtggggatgctcttctcgaggagtatctttgtggtgttcgctgtatttcctgaatttgaatgttggccttccttgctagattggggaagttctcctggataatatcctgaagagtgttttccagcttggttccatactctccttcacttttaggtacaccaatcaaacataggtttggtcctttcacatagtcccatatttcttggaggctttgttcattccttttcattcttttttctctaatcttgtcttcacgctttatttcattaagctgatcttcaatctctgttatcctgtcttacacttgatcagttcagctattgatacttgtgtatgcttcacgaagttctcgtgtcgtgtttttcagctccatcaggtcatttatattcttctctaaactggttattctagtaagcaattcttctaaccttttctcaaggttcttatcttccttgcattgggttggaacatcctcctttagctcagaggagcttgttattactcacctcctgaagcctacttctgtcaatttgtcaaactcattctccatcaagttttgttcccttgctagcgaggtgttgtgatcatgtggagaaggagaagaagagccatcctggtttttggaattttcagtctttttgtcctggtttctccccatcttcatggatttatctacctttggtctttgatgttggtgacattcagatggggtttctcagtgggtgtcttttttgttgatgttgatgctcttcctttctgtttgtcagttttccttctaagagtcagggcctttttctccaggtctgctggagtttgctggaggtccactccagaccctgtttgcctgggtatcaccagtggtggctgcagaacagcgaagattgctgcctggtccttcctctggaagcttgtcccagaggggcacccaccagatgcctgccagagctctcctgtatgaggtgtctgttggcccctgctgggaggtgtctccaagtcaggaggcatgggggtcagggacccacttgaggaggcaatctgacccttagcagagctcgaacgctgtgctgggagatccactgctttcttcagagtcagcaggcagggatgtttatgtctgctgaagctgcacccacagccaccccttcccccaggtgctctctcccagggagatgagggttttatctgtaagcccctgactggggctgctgtcttatttttttcagagatgccctgcccagagagaagcaatctggagaggcagtctggctacagatgttttgctgagttaaggagggctccacccagtttgaacttcttggtggctttgtttacactctgaggggaaaacagcctactcaagcctcagaaaaattgcagacgccacttccctaaagtgggatctatactctttccaggtctacatctagaaggtgaaatctaaactacctgttgttgtttttgatgagaatttttagcagctaaaatatctttattttctatttacttttttcttttataccatctttatatgaggatggattccaatggttgttaatttgaaatgtgtattctttatggaacagaattaacacataagcagttaggttagcttactatatttcttaggtttagagcaacttctcattttggcaaagtacagttttattaattgtacttcatttatgtgtgtgtggaggtgttgatatgtgttctgattttgtaattttcttttgtttctggaggaccctctattttcaatgcttgcttccttgtttctctttaccacttggactccaagagtcatatcctcctttatttcagaaatggtatcctcaaaagactgctaattctagtctggcatatttttaggctccttcgtttttttctgaacagttttattttgatatagaattaaggaaaatttacttaaaaaatctcttctatatcatttacccaagttctctagttctttatttccacaattgccttatcatattctttctctttatatgctattatttcacttctgagctatttgagaataagttgcagatattttgtcgtttcatctctaagtaagtcagagaagcaagagaagactctctctgaaaaactttcaaaatcctcaatctaatcctactctatgtattaatattgagcaatgacctttcaacccaatatcattacactaaaaggaagttagacactatgataaaaatcagcagaaacagtaaacagctttatacttccaataaatgcagacattagaatagtaggacccagaatatagaagacatgtgtatgtaatgattaaagaaataaaggatattatcccaaagaccaaaagattattagatttgcaaattatgaatatgtaaaattataatctgcaaaattaactttagaaacaaaaactaattatagaaattaagaaaattaatttcacaaaaagcagaatatacatagctgaagagaaaattagtgaaagaagttatatctgaaaaaaattacccagaatgcagtacagaaaagcaaggagacagaaacaaacattatattgaaatatatgaaagccaggaacggtggtcatgcctgtaatcccagcactttgggaggctgaggttgaaggatcatttgagcccaagaatttgagaccagcccaggcaacattcgaaaacctgtgtctacaaaaagtataaaaattagctgggtgtggtggcacacacctgtagtcccagctactcaggagggagtatcacttgagtccaagaggcagaggttacacctctgtggtgggatcacaccactgcactccagcctgggtgacagagccagaccctgtctcaaaaaaagaaaaaaaaaagtgaaaatcttaatatgtctaaaatacatttgagaagagaatagaatggaacaggggcgatatttaaagagaaaatagcggtaacttttcataacaaataaaaaatataaatctataaatcaaaaaaacccaatgtattccaaaatgagacaagccaagtataaaggggtgcccggagaatctccaaccggcctgcccactgggaggaatgcacactggggtggagcctcgggaagttcgcaccatttgcagtggggaggagcctgacctcttctgtttgggagtggtaacctggggtccaatctgtgagacaggaagcctgttagcaggactctcgctttgctgagagtccttgtttccctttttttccttttcacccaataaaccctgctcttctcacccttcaaagtgtctgcgagcctaacatttcatggtcgtgttataagaaccagtttttcctacaacaaaagcaggataaggaaagagatgtccaacctaaaccacttcaatgaaatcataaaacatcaaaggtacggataaaattgtaatagaagtcacagaaaggatgaatcaccacaaaagaatgaaaattgtgtgactgaacacttccaacaataaaatggtagcctggcaaacattgtataatatcatcatagtgctgggggaaaatagttcccaatgcggaattatatatatgcagataaaacatctttcaataatgtgggtgtaatggaggcattcagagattagcaaaagatgaaaaaacattcatatataaactaaaggaacttccaaacttttaaagcatacactttttttaaccttacctacagccgaaacacttcatttttaaaagtaaattttatcgtatatatttaaggtatacaacatgacgttatggaatgtacatagatggtaaacatgttactatagtgaggcaagttaacatatccatcatctcccatatttaaccatttttttggtggcaaaaacagctaaaattcttagcagaaatctcaaatacaattttattaactttagtccttatgctgtggattagatttcaactttttcttctatatatctgctactttgtatcctctgacctacatctccctgttttctcccccaggctctcctgcccctggtaaccactgttttattctctcagtatatttgactttttaaaaaaaatttcacatgtgagacaatgcaatacttttccttctgtgtctagcttatttcacttagcataatgtcctccaggttcagctatgttgtggcaaatgacaggatatctttcctttttaaggctgcataaaattacattgtatttaaataccttggtttctttacccatgcatcagtcaacagacacttaggctgtttccatatcttggctattgtgaatattgtcatgaacatgggagtgcagataactttatagggtggtgatttcatttcctttgggtatatacctataagagaaactgctgggtttctatcttagttctatttttaatttatttaggaacctccataccctattagttttccataatgactgtaccaatctacattctcaccaatagtttacaaagattccattttctctatatacctgccaacatttgttatctctttttgataacagccatcctaataggtgtgagatgatttctttttgataacagccatcctaataggtgtaagatgatttctcatagtggttttgattggcatttccttgatgataaatgatgttgagcacctttttacatacgtgttggccatttttatgtgttctttggagaaatgtgtattcagatccttcactcattttttaatggagttataaagagatagaaaaagattagtgatttcctagggatgaaggagtggggatggaaatgaactgctagtgggtatggggtttttggggggagtgatgaaaatgttctaaatttattaaacgattaaaagaattgtgttgatgactgcacaactatgaatatattaaaaaatcattgaagcttatactttaaattgctgttgtgaactataccccaataaacctgttttttaaagaacaaagtttaagctctccaaagtatagcagaaaatttagaacaaaatctatcgtcacttatctctcagagtttctagtttaacattctcttttggagtctttagattccttattctcatgcttaccatctcagtgacatttaaaattaaaaaaaaaaacatgatatattcaacgttttatttatttcagtaagaatcattcagggcatcaaaccttccaaactgcctgtaattaaccagtacttcttgtttaaataattttcatactgtgtttatctttgctacatatttgctcatctaattttaaaaaccctgtaattatttttctgttttattgtttattaaattttaagctctgggatgtatgtgcagaaagtgcaggtttgttacataggtaatcatgtgccatggtggtttgctgcacccatcaacccatcatctaggttttaagcccggcatgcattaggtatttgtcctaatgctttccctctccttgccccccatccaccgagagaccctactatgtgatgttcccttccctgtgtccatgtgttctcactgctcaattccccacttatgagtgagaacatgcagtgtttggttttccgttcctgtgttagtttgctgagaatgatggtttccagcttcatccatgtccctacaaaggacatgaactcattcttttttatggctgcatagtattccacggtgtatatgtgccacattttctttatccagtctatcactgatggacatttgggttggttccaagtctttgctattgtgaatagtgctacaataaacatacatgtgcatgtgtctttatagtagaatgatttataatcctttggatatatatccagtaatgggattgctgggtcaaatgctatttctggttctagattcttgaggaatcgccagactgtcttccacaatggttgaactaatttacactcccaccaacagtgtaaaagcattcctatttctccacatcctctccagcatctgttgtttcctgacttttaatcatcgccattctaattggtgtgagatggtatctcattgtggttttgatttgcatttctctaatgaccagtgatgatgagccttttttcatatatttgttggttgcatgaatgtcttcttttgagaagtgtctgttcatattctttgcctactttttgatggggttgtttgatttttttcttgtaaatgtgtttaaattccttgtagattctagatattagccctttgtcagatggatagattgcaaaaattttctcccattctgtgggttgcctattcactctgatggcagtttcttttgctttgcagaagctctttagtttaattagatcccatttgtcaattttgccttttgttgccattgcttttgttgttttagtcatgaagtctttgcccatgcctatgtcctgaatggtattgcctaggttttcttctagggtttttatggttttaggtcttacgtttaagtctttaatccaccttgagttgatttttatataaggtataaggaaggagtccagttcagttttctgcatatcactagccagttttcccagcaccatttattaaatagggaaccctttccccattgcacatttttgtcagggaaaaccctgtaattatttttcttgggaacaaactgaatttacaaagtaatatgtgggaaatcaacgtcttcataccattgaatttagtatgcatacatatgatatgtttttaatttattcaagttttctcttgtatgttctgtattagaaataatacttcacatgtacattaaggcttattcccatgtattcttgtgggtgctgtgatctaaaatggttctattcatccattatattttgtttgttttgtgtacagaattctactgttacatgtaatagttttcctaattcatttttgttttgtgttgtctaattgcatcataagaaactaaaattttgaatactctttctaaatttttaaatatcatatttcattttcaagtctaataatattggctagtatttccaggaaaatattaaataaaagcggtaattgtggacacccctgtcctgcttctgagcaaaattttcactattaagtatttgataggatttggtttaatgtcatatatatagatatgtgttgtatatgtatgtgtgtatgattgcatatgtaactggtagcactgcaattgaaaaatacacatttgaaaccataaatacatatttgaaatcattgaataggaaaaatcgatgtttgcagcaacagcagcaaccagctataagaacaatgccatcaacagtgctaatcttgagtaaaacagctgatgatccagcaaattatatatcatatatatatatatgagaatcttggtagaacccttaacagaatgaacttgaagaaaccaagcctagacataaagtagtcaaattgctgaaaataaaagataccccgcaaaattttgaaagcaattggagaaaagtgacacattatataaagaggaagcaaaattcaagctactacagattcctcattcagaaattatggaaggcagaagatcatgtaaagtgttcatcaccttaaaaccaaaacacacatgcccacacaaagtgtcacttcaggaatctaaatccaggaaaaatggcctccaaaaaaggaaagcaaaaaaaaaaaagcaaaagcaaaacaaaacaaaactgaacttccagataaagtaagctatgtgaattcatttccactaggcctacaagaaaaattaaataatgttcttgtatcttcaggaacaaatgaaaatgataaatagcaaagaaaattcaaaagactgtttttcctcttaattaaaaaaagacatgatgatttaaagcaaaaattataacaatatatttggatgtactatatgataaccatagcgtaaaggacagtaggggaagagaaatagatctacatggttacaagatttgcaaattttatgtgaagtgttacaatgttagctctaataggctttgaatagttaaggaagtatattgtaatccctggagcaaccaataaaaaatatgtgaaaataaaatgcttagattaatatttaaattaaaatggaattctactagaaaatattgaaataacctccaagaaggcaaaaagaggaaagagggaaaaatatgacgggacccacaaaacaaataataaagtggtaggccaaaattcaatctcatcagtacttacatttaatattaatagattgaactctgactagataaaagcacaagactcaactatggttattcccagtatccgttgattccaggactccccctcctatacccaaatccacaaatgcttaagtctgttatataaaatggcataatatttgcatataatctacatacatcctcctgtatactttaaatcatctctagattacttatatgcaatacagtgtgacactatgcaaatagttgtgatactgtattgtttctttttatttgtattattttaaatttttgtatttttaattttttttctcagaacacttttgatctttggttttgttgaatctttgggtgaagaatctgtgtatacaaaaggtggactatgctctttataggatatgtaatggatgcctaataatagatccccaaaataaataaagcaaaaatgggcagaattaaactgagaagcgtgcacttctataatcatattaggaaatttaatagcactctctcagcaattgatagcactagacaagtatcagttcaattacagggaatctggaaaacaccatcaactaccctgacctatttgttttttaaaatacataaaacaaaaatgaacagaattacaaaggaaaatccattataagagaaatgttaactcgcttctctaagaattgaaatatcagaacaaaaaattagcaacaatttaaaccatacaaaatgaaaaacacaatttcaagtttgacctttatgtaacaattagaaaatgtcggccgggcgcggtggctcacgcctgtaatcccagcactttgggaggctgaggcgggcggatcacgaggtcaggagatcgagaccatcctggctaacacggtgaaaccccgtctctactaaaaatacaaaaaaaaattagccgggcatggtagcgggcgcctgtagtcccagctactcgggaggctgaggcaggagaatggcgtgaacccgggaggcggagcttgcagtgagccaagacagcgccactgcagtccagcctgggcgaaagagcgagactccgtctcaaaaaaaaaaaaaaaaaaaagaaaatgtacattcttcccaagcacacttagaatgctatggtaattggctctgcactgattataaagcaaatctcagtagattttgtagaactagttatgtcatattctctggctacaattttaaaatccatcataaaaaacatgcttagaaattgaggttgggtgtggttgctcacacctataattttagcactttgtgaggccaaagagggaggatcacttgaggcctccagaagcttaggaccagcctgggcaacatagtaagacccatcttttattaataataataacacaaataataaaaatgaaaatgtttagaaattagaaagcacatgtctaaataactaatgggtcaaaggagaattataataggaattatagaaaatatctcaaactaaatattaatgaaaattatatatgattaataatattacatttaaagacttataggatatatctaaagtggtacttagagaaaagttttattttagaaaataaaaatggctaaaacaaaagggaaaaaaataaacccaaagaatgtcaatagatgacaataaatgcctctattatcaaaatcactggtgcttatgttattgtgaggcaacaggaatataatctattcctgttttatatgttataaaagacatcaaggctgatgtgttgaacaacctgtaaacagaactttatttcaacagaaaagcagaataatagaaaacaatccaaactgatgaaataaatatggatatggtaaaaaaaataaaagtatcaaatgtccagtctagccaaaagaactaatagaaactgatatttgagaagaacataaggaagtaagtagaaaatttatgactagctcatattatacttttacatataaaaggcatgagtattgggggttagctgggggtgtgtggacagaacttatcccctatcgtagaaataaatagttaatcctgagtggtatgtatagctaatatctacccaaggtttctgtaatggcaatctctaaataaagcatctctaagtaagcatctaaatgtaaagtaatctctaagtaaaccagctaaagactaaaacatttacatcctggaagaatgttgcaataatttgatcatttactgatggagcatgtaactatggtacaaaaaaatggcagacaaacagcatgaaataattctaagaatgcttgtgatctatgggtcacccattacagaaaacataccactactttccaaatgtgacatgataacgaacgctcagaaactgtaacatagaatatgtttgatcaactgttagtttctgacatatctattattacaaataatcaatgatatgaggtaaacatagaactcagatcatcaccaatattatcaaataatttagtcatctgaattatatatatttatacatttgaattgcttattcttccccattaggtatacagatccaatataaatcctcaattaagattaaaatcctcatttaggattaaaatgctcttctcaatgtggaaggcaataagaaaagtaaaacctaaaattaaaaccacagtcttcataacttactggaatcaaatggcagaaatggaaacaagtgggagaatctagaaaacaacagactataaagtagtataggaattaactctgaaagtcacatctaaatagtgccattctctcactggctcctcagcccttaaaagtgacaaaatttcctatattatctcctctgccccagatatatcaaccatccattatccaatttttggttgggacagtacataactacagcttacaaaacagggatgtgggttggtaggaagaagggaagtatggaaagtttggggtacaatgttgggatctgtaggtggtataaaagggatgtttagaaccagaagctatgtcctattacttttttctaccaaacgcattaataccatctctcttacttcaagtcaaggcactgaattgccagtgtttattccttttgaaagcatacatcttaccatgtggaattgtggtctggaaagggcgacttgggcttttcaggttccataaagtcaaactaccatctgaatggctgcacatgaactgtttgccctcatgatgccaatcaattgaatgaatagcctaataaaataacaattaaaacaagtagagggggaaaaaagtagataggttatatcattctatattccaaagaaaaactattctgatataaaattattatactaacaacacttaaaaaacataatttttctgacccatatcagactataatttctggtaagatgaagtcctatttcctcctcacatagccaattaaaagaataatttaagtaagagctaccatctgaaggctttctatgtgccaaaccccaaggcaagcattttatacacattatttcatttaatcctataaaaagtgtattgatttttcaatttacacatggtgaaacaggccttgagagattgagatacttgctcaagtcacagaactcaaaaccaaggtctaactacgaaaaacgttctcaatcattgcactgtattgccctcttgcatatactatttaaatcaatttaaagcaagaaaggtttaaattttcttttatattttcaggttaactctgtagttttgagtcagataagattcaaaagtaattacagccatccctcggtatccactggggattagttagagaactcccacactccctcagattctaaaatccacagatgctcaagtcccttatataaaacagcatactatttgcatacaacctatgaatatcctcccatatacttaaaatcatccctagattactaatagaatgtaaatgatatgtaagtagttatactatactgtctttttatttgtattattataaattattatattgttttaaaattattttttgtttttaaaatatttcctattatagttagttgaatccaaggatatggaatttatggatacggagggctgactgtatttcattttcccaagctattgtattcccaatgctagcatagtgaccagcataaagtaagtactcaataaatatctgttgactgaattagtaattaatgtcatatgcatttccacacccttggtattctttctaaattaataaagtacatacagaacttgggtaaagtactaagtactataagaaaaattctagtagacataaaggcagaaaagaagcatacaacatcttttccttaaagacacttataaaacagcaagagagagaagattaatataagtgaatactaatcatatttattttttgaaacttcacacacagacacatacaactaaaatttccaaactaagttacacatacataactgataaaagttctaaacaatcagtattattagagttgcagataactgatggctaaagtaattattacacatataatcaagaaaataagatttgattaagtggaaaaagcaacatgaaatcctggacttgtgttttctctcactctgtggccttcattactaagcagagatttcttttttgctagggtccagcagaggaagttagagataaaatactttttttctcttctcctctgcttatttcttctcccttctgtaggtggttcaagggaaagtcacatcttcttgcctcccctacatgttaactttgatgagcctcatttaacttaaagttgtctcaaactgttttgccatcaaagatggaggcagaaaaggcactctcaaccctaaactttcttatttcactgaatttctatctactggagaggacagatataaaaacaatagctaaataaagccaaagtaagtcagtactattaaagaagtatatttattgtttagaaaagcaagcatgtaaaaccaacttgttattagagatcagggtctcatatagtgcattactgagtagctagcatttgatctaacttgatggataaatattcaatttctatttattagattctacccctctcttttctcaaaaaaagggaggggggctcagagggcttactgaaaaaaacaaatataatacaactaatccaaaaagaattttaagagatagaaaacagaattttaaacataaaatactagctagttttatcaactcagtggctgagactgagtttcttgaacacatgaaagaagaaggaaatccaaaaaactggataacaatatccattcatcaatggctatttatgaagaggctagttaaattgtctaaatagttttacaggggctaaagacctaacagaattttgatatacagaagaggaaagaaggcagttcatgatgagaagttagaaggagcaaaggctcagagataagcaataagtgttatatatggaagatagtgagtaatatgtctgaaatgtggggaatgtgtagaaggatgttgtaaatttaactaaagaggaatgatagcactaggaccttaaatctcaagtcaagcaatatggactgtgtattgtcgacaattgagagctattcaaaggttctgttgtagagaattccataatctgttttaaaatgataatcttgttaatgaaggatatattgaagaggtaagacatcaaaggaaaagtggttgtgattagttaaaatgctcttatagtcatccaggcaaaagataacaacttaaactaggacattggaagtgggaattagaaaagaggaaataaatgagacaatataaaatcagaatcagaaagcctgcagaaattgattgcatatacaacacgatgatggaagagacaaatattactttgaggggtctaaactgaattaactaaacaagacttaaaaaccagaagaaaacatagaaggaggtttagatatttaaatacaaattcagtgccaatgggatattttgctggatttatctaatatattgttagatatttagatctagagttcaagagggaggtaaaggctacagatatatggatgttctttttttagcataaaggtaatatttgaaataagagataatataaacactagaaagtataaattagagagagaagaaatgagggtaaagacataatatcctgaagaatatcaataacgtaaaggagagctaagggaaaaatcagttatggaaaaaggtgcatgataaatgaggtggaaagacacagacaagtgaataaattattttaaggaggagaaactgaggtaaagccacaggtttagtgaggaatttaaaggcttggaagaggtcactgtgtgtagtaatgaagagcttattggtgacttaagaaaaaacatttcaggtaagtattaagcatgctttctagatatgagaggtaaagtgctgaggagaggctgaaaagtttggtagtgaaatgaagtatttaactatctctgttaaaacaatagagcatataatgacacattaaagtagataaagatgatatatttacatacatatatcagatgtcaataacttctaggtataaattacatatatttgtactaaggcagctgcaaatccttattttaaaatttcactgaaattttactctctttttaaggctcaaaacgtttcttccatactttttaaggccataggaaagctagatgattcagcattttcctctgggttttcttttgagctggttattctaattccaactggctaaatattcccatggtgtttgtattcttatttagctgctagtgttgagagagggaagagaaggagcactatccatccccatctttatgatttgtataacaaaaggaaactcctagcttagctccctaagaccttcttttcttatgattcaagatgctgaagaatttgattataaagaacataactgcatgatattacttatcagattatttttcaccaattgtgaaaaaattacccagctgccattttattttatttctaaacatttttttaccactatgagaatgactgataacgaattgtgcagcttatgaaataggtgaaggcttatatctttaagcaccgaaacttaaaaaattaactgttatgagggggatgggagagaacatgtaaagtattctagggtgactacaggttcatctggagactttttttatccctccaatgataaaataaggaagtgttctaaaataaatgtgtgtgtgtttcattttctaattatttcagtgctgctttaaattatttggcacttttcctatataagattaggttttactggacataaatttttgacatatattttcctcctatctcttcctactcccaccattttcaaattgaattaatagcacagatgatcacctttgtttccacaggtacaaaaggtaatttcccttttaatctgttgcccccagttttacggtcttcttattagcctcttctgaatggaaaaataattaatggcccggaattaatatttgaacaactgaagtgtcaactgggagattattccttgatgaataggagtttgttgcttcccctaaatacaaacttaatcaagtctcaattacatacaataaaacttacttcaagatctggtcatttaataagtgtcacttattaatatctggtcacttaataagtattactatttacaaaatttttctttattctaagaaggcaagtattagaagacaagacctttcaaactgacttgaacttcttgccactgaaaaggaattttctaaggaaggtgtgaatagtgtctttagagaccttaaggacaatgaggcacaacgtagcatggagcctacagaaaggaaaagcagttgagacaaagttggggatatagtacaggtgacaggcacccaagtatataagattgacaaggcaggatctattaacaaatgcaaagtatataagatgccacaagagggccccgaaataggcagtcaaggcagaatttcctcttaaaagaaaaatctagagatggaacttacacaaatactaaaagacagtgtgaagcactgggtcagaatcaggcaactttccaaggctaaacatactggtaaagtgcaaagcttaaaagtagtaaacaggcataacgtcacaatactctttcaaacatgtcggtagaaatcacttacctcatcataataaactctcagttctgctcttttagatttcaagtcccagaatactacagtaccattttcataacctattagcagctggaaaacattagaacaatcattttcttaattctaacattaattttaacttgcttcaaataaagtttaatgttaataaagtaaaatcataccacataacatccttatttagaataaatttttctagaacttgaatataggttttctacatttaaaaaatggcaaactctgcttcaatatgaacacttaccaataaatcacctaatttcaaagaggaaataaggaagaatataaatatatatgacatgatataaaataagtatgaaaattggaagaaaagaaaaatgggatagaaaacgaagatgaaataaaacatgaaatgggataagattaatgaactatgtatatgccattcagtcctatgcacttgagaaatgtggcttcaaatttggcttcaaatttcttctaccaaatcctattttctctttgaccgaattcaatattttaaactgatgttttatgaaccctctgaagattataaagttattctagagattcacgtcattaaaaagattaatatttatttttaaatcaataaataagatgattaataaaatatttctttaaaatagaagaattttagaacatatcatgattataatatgatcatctttaagactcagtcattaagctaaacaatgctagccatactgataacttttgctgttaaatgattcacaattattatttgtatccttcctatttttttgttaccaatgacagaaaatttaacctatcattggttagggaaaaaaaataagaggaaggataaaaatagccaatgttaaaataatgatatatttctgacagatttgccttaagatgattttcttcaaatacattagtagtattcctctgatgaaaattcttatacactggataaagatgtatcaataacttcaaaaaaccattggtaagaacagaaaatatagtggtggtgataacctaagcctgcagagcatcctgagaccttatcacttatctcgacatcttacaatgagacacaaaaaataacaaaagtaaaccagctagtagttttcgcagtaaaaacacaaaaggtttcaaatatcagttcattaaagcaatatacatttatttttgaagctataacaaaaatgcttggttattaaaccacacacaataaatgttaaaaatgacaaaaaattgagctttttacatgttaacttgaagtaaatggcatatatgacttgctaagtgaaaatgtcaaaactaaatacatatttgagtaatatttcttaaaataaaattgatatgactgtactaagtgtactaagatatgttttaacttcaaattgattttttttacatacaagagaaaatgatgaacgatgaaaccaatttcttttctttctttttttttttgagacagaggacagagtcttactctgccacccagggtggagtgcagtggcacaatctctgctcactgcaacctccgcctcctgggttcaagagattctgtgcctcagcctcctgaatagctgggattacaggcatctgccaccacacctggctaatttttgtatttttagtagagatggggtttcaccacgttggccaggctggtttcgaactcctgacctcaagtgatctgcccctcttggcctcccaaagtgctaggattacaggcatgagtcaccatgcccagccaataaaaccaactttattgagtgtatgagactcttggcaaggagatattggcaaggagattcattagcctaaaaagtttagaaaatataacttaagcaataaaatgaataatataatctttctaaatttgagccccaagatttaataaaataatatcctaaaacactattatattttattaaagtaaatatctgaaagataaaagttgatttgcttataaaacattgctagcaatagccccagtaaatcacaaaatataacatactgaacctcaaaaacaccataaactgttgagataagtatacaagattatgatttagaaaacatgatattagaatcagttagagaattagaaaagagaaaagaatccccctgacatccaggagacattagacaaggccactctgtgaccatgaggaaccaagacaaaaataagagcactctgcaatatttgaccacaccaaaacaggaacaatgcccaaaccacaaattatatatacatattttttaaacagaaaatgtctctcacaatagaagcaagtaccataaaggcaaagaagtagggttacttcttcaccatgatatcattagaacctacactagtgtctgaaaaaaataggtatttggtgaataacaaattaattgttaaataccaaaaaatcaaaattgtagatattatattctaaccacagtaaaataaaattagaagtcatgacaaaaatattttgaaaactaaaaaatatatctgtaggtaattaataagcaaagaagaaatcataatgaaatatataaaacagaactgaacaaaaatgcctcacaagacacagatgaatcttaagaggaaattttatggttttgtaaatatgtacgtagagaagaaaaactgaaaatgttttaatgatataagcatttgactttgaaaagtaaagaaaaaagtaaatctcagaaagcagaattaaaaataatgagccaccttattcaagagcaaaggataccaccttttatttattcgagtatatgtttatatcttttaggaagtttgaaagttttccacatattgattttcttgttaattttatacctagttattttaactttcttattgctattttatatgggttcttctcttcattaccttttctaatagggtattaattctatagttagattttagtatacacctttctaaattattttgtttgtattcattttaaggttgattctctttgccattccagatatattatcatataatctaaaatagagactactttatttttttctaatttttatgtctctaattgtttgtatttatctaactgctttgctaaaaatcatcctagagtattaaaaatagtagagaggctaagcatccttgccttcttcctgactttggtggctatgcctctagtgtttccccattaaataagatcctgaattctggggagggagggagagggcatagaaagagagagagagagatttaaagaagtataaattgatttatatgttatacatttcttttattaggaataggtgtttaattttaaaataaatatttttgttgaaatatatataatgtacacagattatagatgtatatttaatgaattatgatgaagtaaacatacccatgaaactacaatccacgttaaaaaacacaatagaagacaagtaatacaagaaaaacaatacaagccattcacagaagcctatttcgtactcttacctagttaatattcccactctcctctctaaaaataaccactatcctgacttctaacaccataggctactgttacctgtttcgaattagacaggtagaattatacaatacatattgctctctttcttgcttctatttctattatatttgtagcattagttaatttaatttcattattaaaatagcatttcattgtttggctatggcactaccacaaattaatttattcattttacagttgatgtaataatactgccatgaacaaccttgtacatatcttttggtaaatacatatatgcatttctgttaaatgtatattgatccataggatattagtatgtttaactttaatagatactgccaagcagttttccaaagtggttataccaaccacttcatgttttcattttcacaaaatgtatatgagttccatttccttctcatctaatgaccaatattgtgaatagctgtacaatgttaaattaaaggaataaatcatagccatctttgtctcatttatcatttcaggaggaaaaatattaattcatcattaaggaggatgttttcatagctttgggaaaattaacaaagttcatattaatgaaattcctttctttccctagtgtaccaagagatttttataatgaagagaaggtaaattttattaaatgctgcttattagctatttttattgccatatatttttctccttatttctgtgaattgcattgactgattctgaaaagttaaaccaactgtactactagggggagcataaattggttgtgattttttgtgccttctctttcattcttgatcagacttgccagagatgcatcaattttgttagtattttcaaataactgttttgttaatgtactaaatttttgttttctattcttttaatttccgctctcatcttttgaattaaggttctccgaaaaattagaaccaagagatgtttttctatgtatagaaaaagatatttattatgaggaattggctcacgtgattatgaaggctgacaagtcccaagatctgcagggtgagctggcaagcaggagatccaggagagctgatggtgtgccagtctgagtctgaagacctgagaaccaggagaaccaatggtatagttccagtctgaaggtcagcaggctcaagaaccaggaagagccgatgtttcagttagagtccaaaggcaggaaaaagctgatgtctcagttcaaaagcagtcaggcaggaagaattctctcttacttgaaaaagggttagcctttttgttctattcaggccttcagctgattgatgagacccactcgcattaggaatggcaacctgcttcactcagtctacagatttaaatattcatctcaaccaaaacatcctcacctaaacctttagaatgatgtttgaccaatatttggttacctcaaggcccagtcaagttgacacataaaattaaccattatatctttattgttatctttctactactttctttgggtttaattcactgtttatctagcttactgggttggatactaagatcactgattttcagcttttcttcactttttaagaaatgtaatataaactataaattttcctggaggcacagctttagctacattgcacaagtttttgatatgtcacattgttattgcaattttgtttaaaatatattctaatttttatactgatttcttctatgacatagaagctattcagaagtgtagtacttaatgactaaacaattaggggatttttcatttatctttttcttattgataatcttgctaaattctcttgtggttagagaacatattgtgtattattttaatcctctgaaatttattggcatgttttttggttcagcaaatatacaactttggcaaatactctataagcacttgaaaataatgtgtggtctgctagtactatatacataatgtattatatgtgtcaacttggttaagttgttaatcatgtggttttaattttctttatccacactaattatttctttgtttgtttgttttctcagtgactggaagaggtttgttaaaatctccaactacaattgtagatttgagtatttttcattttagttctgtccaattttaaaaatatttttagttctatcaaattatacatacacacacatcatgattccatgcaaaatgaaaacacaattcagataagcacatgttttagttaacgtggtaccatgcaaagtaagcactacctgtatactataaatctatgtcatcattaggcatatacaaatttaggattattacatcttctgctgaattaaccaatttctattataaaatattatccttaaaaaagtttttgccttaaagtctgtatcctctgatattagtatagttacacaagttttctttggttatggtttacatactatatccttttgcagttttgcgttaaacttttctacatctgtaagtttaaaatgtatctcttgtaacagcatattgttgttttagcagtttgcaaattattgtctggtaattagcctatttagtcagtttacatttaatataattgctgacatattttagaacaaagctacctacttatcttgtatttgtcccatttgttaatgtgtcctccctctttttgggaagggagttggttagtagttttttcttatcctaattttccactctattaacttatccattatacatacatttattatattttacccaccagaataaaaatttttcatgacttatcaaattataatgtaaattagtacttgtgctactttctggaaattataaggactgtattagtcagggttctccagagaaacagaatcaataggatatatatctgtatagctatataagaaggaatttattatgcaaattggttcatgtaattatgcaggattagaagttccacaatatgctctctataagctgactaagtaggaaaactgggattgtaatttagtctgtgtttgaaggcctgagaaccagagaagtgggagaggcctgggaaagaaaagtctgaagtcctgagaaccttgagctgatattcaaaagcaggaaaggatagatgtcccagttccagtagagagagcaaattcacctttcgtcttttttgttctatcctaagctcaataaactggataatgtctactcacattggtgagggcagatattcttcactcagcctactaattcaaatggtcatttattctggaaacactttcacagacatactaaaaataatgttttaccaactctctgagtattccttaatccagtcagtttggtgtgtaaaattaaccatcataaagacattggcaattaaatttagtgaacgtcatcccaacttgtatcataattctcaatatattacactgcaagaagtcattattatttttataaaatatttccttagtttaacacgtttgtggttctttattcttttcttcatctctgttcttatataatagatcattttcatttgcttaaacaagtcttttaggtttttccttagtaagatttgatgttgatgaattgttgcaaattttgtttgctgaaaataatttgatgacatgttttaaattatatttttgtagagtatagaattctcccagtggaaggactgatctgattatcaaaactggaaatacaatgggtgctaaattttattcaaagactttttcagcatcataaagataatcatttgttcttagacctattagcgatataaattatattgatggattttgtaatagtatctatccttgcatccctggagtaaaacaccactagtcataattaattattttttaatgtgctggtgggattctgtctcctaatattttatttaagatttttccattaatattttattttattgtagtaagaacactgaacatgagatctaccctattaacaaatttataaatatatagtacattactggtgactctagatacaatgttgcacagcagatttctaaagtttatacatcaatcaagcttgcttgactgaaactttaagttcattgattagtatctctgcatttcaacctcccccagcccatcagccaccattacactctttgattctatatatatgactattttagatacctgatataagttgaatagtgaagaatctgtctttctatgactggtcatttcacttcacataatatcctccaggtttatccatgttgtcacatactgtaaaatttccttatttattaaggctgaaaagtattccattgtagaaataccacgtgtattataggtacacgaagggatactcttccaccctaataagggctgggtaaccacatgttgtttattcatctgccaatggccatttaggccatttccacatattggctattgccaaaaatattatgatttatttctctttgagatcttgatttcaattctcttgtataaatatccagaaatgggactgctgtattatataggtagttctatttttaattttttgaggaacctccacactgctttccatagtggttgaaccattttgcagtcccaccatacaagtgttccaatatcttcacatccttgtcaaaaggtgtctttcggtttaaaatacatacacataataatgatcctagtatctattcttggttttgatttgcgtttctctaatgattagtaacattaagcacttttccatatacctgatcttaggcattctttgtgtgtgtggttaccttaggacttatataaaatctaatgctctgttttaagctgataacaccttaagttcaatagtataccaaaactctacacttaaaacttctcttcccctgacacatgctttatagtatagacattggagaaatgtctatttaagacttaagcccattttaaaatcgggttactagatttttttttttttttttttactattgagttgtatgagtttcttatgtattttgcagattaacgctttacagatacatggcttgcaaaaattttctcctattctctacattgtgttttcacgctgctgattgtttcttttgctatgcagaagctttttagtttgaccttgtcctacatgtttatttttgttttcattgtagttactttcagtgttaagtttatagagccatgacattgtcaaaaccagcgtcatgaagcttttcttctacgttttttctacatatttcagagtttaaggtcctatgtttatttcagagtttaaggtcttatgtttaagtctttaatccattttgaattgatgtttttagtaagatgtatgaaaaaggtctaattacattcttatacatgtggatatccagttttctcaataccacttgtttaaaatattatcctttctacactgtgtattcttggcacccttgtcaaagatcagttgaccacatatgtatggattatttctgggctctctattctgttccattggtctatatgtctgtttttatgcaattgtcatactacattaattattgtagccttgtaatttagcttaaaatcagaaagtgttattattatgtgttgaatcatccttgcacttcagagatagatcccacttgatcatgatgcatgattattttaacgtgctcttggattcagtttgccagtattttgttgaggatttttgcatctatttcatcatgaattttcacctacagttttattttcttgtgatatatttgtctagttttggtgtcagggtaatgctgatgacaatgttttccccttttcaagttgtttttttttttttaatttaaggactgatgttatttcttcaaatttttggtagaattcactagtgaagccatcctgagcttttcctcgttaaaaggtttttcattactaattcaatctctatactagttcttagacgttctgtttcttcatggtttgtcttggcaggttttatgtttctaagaatttactcaatccttctagattatacagtttgttggtatataactgttcttattagtctcttatgatccttatttctgtggcatcagttgtaaatcactcctttcatttctgattttatttatttgaattttaaatcttttttacttagtgtagctgagtttgtcaattttgttgatcttttcaaataataactctcagttttgttgatttttttatccatttcatttatttctcctctaatgtttatttccttccttccactacatttgtgcttagtttgctcttctctagttccttgaggtaaagttgtaagtttgcaggtctttcttattttttaatgtaagcatttattgctagaacttccctcttagtattgcttttgctgcatcccataatttttggtagagtgtgttttcatttttgtctcaagatattttctaatttcttttttgatttcttattgaggcaatggttgtttagggatgtattgtttaatttctatatatttatacattttggagttttcttccactattgatttctagttttattacattgtggtcagaaaggatacttggtatcatttcaatcttcttaaatgtattaaggtttgtttcatggcctaacgtgttatctattttggagaatattccatgtgtgcttgagaaaaatgtatatcttgctgctgttgggtggaaagttctgtatatatgttaagtccatttggtctatagtgttattgaagcccgctgattccttttaatatatctggataatctgtctattattgaaagtagagtactgaagtctcttactatgattgcattgctatctatttctcccttcagttctgacaatatttgccttatatatttaggtgctctgatatcagatgtgtatatatttataatcattattttcttcttggtggatagacctttttattgtccttctttgtctcatgataatttttgacttaaagtctatggtgtctgcaataataatagccatccctcctcacttttgtttactatttgcataaattatcatttgcatgaaacatgtttttcagtctttatatatccttaaatggaaagggagtttactgtagacagcatatggttgggtcttgttttttattttttatttttctaaatcaattcagatactttgtatctttcgattggggagatcaatttattaacatttaaaataattattgacagggaatgatttgccattttgttagttgttttctgtttgtcttataacccttttgtctgtcctttcctctcttgctgtcttcctttatgttttttattgatatgctttgatttctttttattttgtgtaacttcttaggcattctttgtgtgtgtggttaccttaggacttacataaaatctaatgctctattttaagcaataacaccttaagttcaatagtataccaaaactctacacttaaacttctcttcccctaacacatactttatagtattgttgtcacaattttcatctacttatatggtgtatcttctaacataattttcagttagagttatttttactaattgtatcctttgaattactttactgcaattacttttgcactgtcctaatagaattaagtgatgtacccatcatcatctcacactacagtattctgaatttgtttgtatatttacccttagcaataagttttacacatttttttttttgagacagagtttcactcttgttgaccaagctggagtgcaatggcacaatctcagctcaccgcaacttctgcctcccgagttcaagtgattctcctgcctcagcctcccgaatcgctgggattacaggcatgtgcaaccacccccagctaattttgtatttttagtagacacagggtttctccgtgttggtcaggctagtctcaaactcccaatctcaggtgatctgcctggcttggcctcacaagtgctgggattacaggtgtaagccaccatgtctggcctaagtttcacacttccttctgctattgcattgctgtttaacatacttttctttcaatttcggtattttttcagtctttaaaaagtttatttcttttatattgacagataacattgtatgtttttatcacatataacacagtattttgaaatatatatacattgtggaatggttaaacttattatagttaaaagcattccctcacatagttatcattttgtgataagatcacataacatctacactctatatttttcaacagtgcaatatatcattacctataatcaccttgtaatacattagatatcttacaatttattcctgctacataactgtaattatgttattctttgaccaacatgtcctcatccattcctcctcattaaccacctcagctgccggtaagtaactttcctctctctacttcaatgtaatcaattttttaaaattccacatatgagtgagatgatatggaatttgtctttctgtttctggcttatttcccttaacgtaggtcctccaggttcatccatgttgtcgcgaatgagaagatttcatcattttatatggctgaatagtattccattgtgaatatataccatattttctttatctatttatccaatgatggataattacattgattccatatcttggccattgtgaataatgttgtgacgaacatgggaatgcagatatctcttggatatattgactgcaattcatttagttatataccaagtagtggtattgctggatcacatatggtatttctatttttaatttgaggaatctccatactattttctacaatggttataccaatttacattaccttctctccatatgttcaccagtacttattatcttttgtctttttgataatggcaattctaaatgaggtgaggtgatagctcactgtggttttgatttgcatttccctgatgatgagcgatgttgagcatttcactatatacttgttggccatttataatatgtcttcttttgaaaaatgtctcttgtcattcatagtttgaggaattacacttaattatttaatctattttaattttttaatatagtgagaaatgagtgtttcatgtcattcttccacatgtgcatatacatgtctattttgtccatttttcaactgggttgtttggttttttatggtgagttgtctgagtcccttatactcttgaatgtatagttgacaaatattttctctcattctgtaggtggtctttttttcccaagtcttttattgtcactttcagcataagtgatggtttgtccaacatactttgaagtctgcttatagtaataactattctgctactaagtacggtttcctttgcattgtcctccctcttcaagtttcatacatttgagaattaatcctgactggttgcaatagaatatgtaccattttcttttgagcctaaatgatggtgatgaggttaatgttctcattgcctttgaattaccattttgattcagaactcggaataaaaatagaatttatatcctccaggtaagtagatatttattatatctgttcttatagtgtgattgttaagagcattgactctgagccacattgcctaggtttgaacactaattctgatacttacaagcaacacgatcttgggtaagttaattcatattccgccttaattgtttcatgtgtaatggtactcctctcatagggtttttaaaaatttgacatgtgtcattctttttctttttagttgacatatagtaattgtacatgtttataagagagagtgcttttttacatttgaacaatgtgtaatgaccaaatcatgataattagcatatccatcaccttaaatattcatcatttatttgtgttatgaacattcaaaatcttctccttcagcttttataaatatacactaaataattgttaatcatattcaacctatagtgctacagaatgctaaaactcattctttccatatagatgtaattttgtgtccattaaccaacttctccctttcttctccttgacttctactcttcctagtttctaataacgacaatgctactttaattctgtgagcagaatttctgtttaaccctccaatatgagtaagaacatatttatttttctataactaacatttcacttgtagattgtcttttcactctgttgtttcctttgctatgcgaacatttttgtgtgtgatataatctcatttgtctattttaacttttgttgcctgtgctcttgagttcttattcaaaaaactccttgcccatacccatgtcatgaagcatttcccctgttttcttccagtaggttaatagtttaaggatttacacttaattatttaatctattttaattttttaatatagtgagaaaagagtgtctcatgtcattcttccacatatgcatatacagttttcccaatattatttattaaggagactttcctttctttattgcaagcttttggcacatttgtcaaaaatcaattggctgtaaatgtgtggatttttatgttgggctctctaatatgttccatcagcctatgtatctgtttttatgccagcaccatgctgttttggttactatagcattgtggtatactttgaagtcaggtaatgtgatgccttcggctttgttctttttggtcaagactgctttggttatttagagtctcttatggttccatacaaactttgtggtgttttttctatttctgtgaagaatggtattggtattttgatagaaactgtattgaatctatagatcacactgagtggtaaaaatattttaactatattaattctcctaatccttgaatatgggatagctttccatttatgtgtcttcttcaattctcttatcaatgtcttataatttccaatgtagagacctcctttcacctccttaaatttattcccagtttttttaatggatatggtaaatagaattgtttatttctttcacaaataatttactattagcatatacatatactactgacttttgcatgttgattttataacctgcaacttaactcacttataaattctaaaagccttttagtggagtatttagggatttctatgtataaaatcatgtcatcagcaaaaagggacaatttaacttcctcctatcaaatttggatgccttatatttctttcacttgcctagttgctctggtcaggacttccagtattatgttgtataggactgctaagagtggacatccttaccttgttccggatgtcagaaaaaaagtttttaactttttcccattcagtatgaggttagctgtgggtcttgtcaattgtggcccttattgggttgaggtacaatccttctatctaatttactgaaaatttatatcataaaggaatgttgacttttgtcatatgccttttctccgtgtattaaaatgaccatatggtttttgtccttcattctgttaatatgatgtattatgtttgttgatttgaatatgttgaaccatctttgtattcctgcaataaatctcacttggtcataatgaatgatctttttaatgtgctgttgaatttggttgagtattttgttaaacgttttgcatctatgttcatcaggaatatttgcctgtagttttcttttttattatgtccttacctggttttggtatccaggtatttatctatttcttctaggctttccaatctgttggcataaaattgttcataagagtctgccaatcctttgaatttctgtggtatcagatgtaactttttttcatctctgattttatttatttggtcttcattcttttttcttagtgtagctaaaagtttaccaattttgtttatatttttaaaaaaccaacattttttttattcttttcaacttttattttaggtttaaggggtacgtgtgcaggtttggtacatggggaaattgcatgttatcagggtttggtgtacaaatagttttgtcacccaggtaattagcataatacttgataggtagtttttcaatcctcaccctcctcccaccctccaccctaaaataggcaccagtgtctactgttcccttctttgtgtctgtgtgtacacaacgtttagctcccatttataaggagcacatggagtatttggttttctgttcctgtgttaatttggttaggataatggcctccagctccctctatgtgctgaaaaggccatgacctcatttttaaaaatagctatgtagtattccatggtgtatatgtagcacattttcttcatccagtccaccattgatgggcacttaggttgattccatgtctctgctattgtgaatagtaccgcaatgaacatacacacgcatgtgtctttatggtagaacaatttataatttctttggctatatatccagcaatgacactcttggatcaaatggtagctctgctttcagttctttggaaaacctctagattgctttccacaatggcttaactaatttacattcccaccagcagtgtacaagtgttacctattctctccaaccttgctggcatctgttatttttaaaaaattgtagtaatagccattctcactggtgtgagatggtagcttattgtagttttgatttggatctccctaatgattagtgatattaagcactgcaactaaggtttattctggtctcaaggctgctgaagtaggcaagaagtgatgttggttgagttctgagtctgctttgctggggcccatgggttcctaactgacaccagggcaggtctagaggctctgcctgtgcatatcagtctagagtcaggagctgtggtggggagggatctgccagatattgagttttactgtggtgggcactatactgggttctacagcaaacctctatgcttatactttcctttccttcgccaagtgaatgatttttctctctgtgctgtgctgcctggtgttggaaaaagggagacatgagttatcttctggttgctgaacttatacccaaagtccactgctactaagatgagaatggcaccagggcatgcctaaggcccgcagcagctataatctgcctgccactgaggtttcttcagggcctaagggcactgtagtcggtcagcggtcatgcaggccagaactcaagttcattccaccatggccatgggttcctgtctggcacctggacatgctaaggccttcagtagctacagcccgcctgccactgaggattagtgggggcttgaggccactgtagttaaccagtggtaatgcagactggaacttcagcccattggatggtgttgtggattttcatgacaccaaggtggtctagagcaggagttccccaaaccctggccacagtaccagtctgtggcctgttaggaaccagaccacacagcaggaggtgaatggcaggtaagcaagtgaagagtcatctgtatttacagctgatccccgtcactcgcattaccaccagagctccgcctcctgtcagatcagctgcagcattagattctcattggattgtgaaccctactgtaaagtacacatgcaagggatctaggttgcatgctccttgtgagtatctaattcctgatgatctgtcactaatctaattcctgatgatccatcacccccagatgggaccatatagttgcagcaaaacaagcttagcactcccactgattctacattatggtgacttgtatagggtgactatcactgaagagtcttacttcaccattgctatggtttgaatgtctcctcacaggcaacctacagaatgggagaaaatttttgcaatctactcatctgacaaagggctaatatccagaatctacaaagaactcaaacaaatttacaagaaaagaaaacaaacaacaccgtcaaaaagtgggcaaaggatatgaacagacacttctcaaaagaagacatttatgaagccaacagactcatgaaaaaatgctcatcatcactggccatcagagaaatgcaaatcaaaaccacaatgagataccatctcataccagttagaatggcgatcattaaaaagtcaggaaacaacaggtgctggagaagatgtggagaaataggaacacttttacactgttggtgggactgttaactagttcaaccattgtggaagacagtgtggcgattcctcaaggatctagaactagaaataccatttgacccagccatcccattactgggtatatacccaaaggattataaatcatgctgctataaaggcacatgcacatgtatgtttattgtggtactattcacaatagcaaagacttggaaccaacccaaatgcccatcaatgatagactggattaagaaaatatggcacatatacactatggaatactatgcagtcataaaaaaggatgagttcatgtcctttgcagggacatggatgaagctggaaaccatcattctcagcaaactatcacaagaacaaaaaaccaaacaccacatgttctcactcataggcgggaattgaacaatgagaacacttggacacaggaaggggaacatcacacaccagggcctgttatggggtgggggaaggggggagggaaagcattaggagatatacctaatgttaaatgacgagttaatgggtgcagcacaccaacatggcacatgtatacatatgtaacaaacttacacattgcgcacatgtaccctagaacttaaagtataattaaaaaaaaagaaatttaatctccaatgtagcagtattgacaagtggagcctttaagaggtaactcaatcatgaaagctctgtcctaatgaatgaattaatgggttaatgaattaatgaagcatcataggaggagaactagtggctgtataagagaagaaagacctgagctagaatattagcacactctgctccctcaccatgtgatgccctgcaccacctcgggacaccacagagtccctaccagcaagaaggttctcaccaaatgccttccctagacctcagactccccagccttcataaatgtaataaataaattccttttctttatgaatttctcagttttaagtattctattacaatcaacagaaaaatggactaagagagctgatatggtttggctctgtgtccccacccaaatctcatctcaaattgtaatcaccatgtgtcaaggttgggaactggtggcaggtgactggatcatgtaatcccttgctgttctcttgataatgagggagttctcatgagatctgatggttttaaagtggggcatttcccctttgcttgctctctcacctgtcaccatgtaagacatgccttgcttcctctttgccttgcgccatgattgtaagtttcttaaggcctccccagccatgcagaactgtgagtcaattaaatctcttttgcttataaattacccagtctcagatagtatctttctagaagtgtgagaatggactaatacaacagctatcttgcttcccttttgcttcaacttaaagaactctttagcatttcttgcgagtcaaatctagtggtggtaaacttcctgagcttttgtttgtctgggaaaggttttatctctcttacatttttgaaggacagtttcgttgaatatactattcttgatggacagtattttttttcttttaggatgtgaatatattgcaccactcctttctgtcctgcaatttttctgctaaaaactgtggattatcttataaagattcccttgtatgtgacaatccactttttcttgctgctttaaaaatcctttctttgtccttgacttctgacagtctgataataacatatctgaacatagatttctttgggttcattttatttggtgttctttgggcttcctgggtttggatatctacattccccagatttgagaggctttcaatcattacatcttttttctttttcataaaatcagggtcttgtcatgttgtccaggctggtctcaaactcttgggctcaagcaatcctctgacatcagcctctcaaactgcagggaatacaggcataagccaccatacctagctctcatcatttgtttaaataagccttctggtccttgatatgcttcttctcattatggatcttctataatacacagtggcccactttaattgtaccccataagtcccgtaagccttcttccctgttcttcattctgttttccttttgcttttctgtctgaattatttctagttacctgtctttgggttcactgatcctttcttctactttatgtagcctgctattgacccctctagtgatttttttttcagttctattattgtgttcttcagctccatgccttctgtttagtacttttaaatattttctctttcctgaaaattctagttttgttcatgaattgcattattgacctcagtgagtctctttttaagagttattttaattctctatcaagtaagtcatataaatctatttcattagggttggtttccattatcttattctttgtttaaatatttttgtctgattcttcattttccttgactctctatgttgctttctgcactttaggcaaagcaggcatctctctcagtcttcctgaaatgttctcatagagaagtcccccaccaattggcctagacagagattctgaggacttctatctactctttcctttcccatggagatacaggcatctgtggtctttatcttctcactctgtgctgaccccagtggggtagctatggcatctaccagctcaagccaccaccttggttctccccaggtagctagatgttccagacccatcagagcttcaggactggtgagatgtgtgctagttcttttggcacccccaaagaagctggggcactggatgcacagatccactcttttcaacctaaggggtaagctgagagctgggatttttcatctgtcctctgtgctaagcagcagggcagggagggtcagaagtgtttatcagcgcaatttgctgcctccattcttgtctaggcagctaggctgtttcagagctgtcagtgctccaagactggcaagacagaagccaattctctggggagcccctttggaaaaattgaggtgctaaacacatgaacaaagttcttacctcccttaggtgaagctgcaacctaggaaatctctccttgaccatatggcactgcaccaggagcaaggtttctggtaagagggcatcctgaatttccttactggtgttaatgaatctggtttcatgttctcctggggttcagaaacttttcaattacattgtcatttctcacaaagggaatttatatgtgaattgtagctgaatctgtgtgtttgtaagaatgaaagcccaggcttcctattctgccactttgctgatatcactccttttccattggtattaatacatccaataaaaccagttttctttttatgcaacttttattaggtttagttatcactcttataattgcttcataaaaacaatttgaatttttttcttttttgaaactatactcagaacaggggttggtaaagtttttctgtaataggccaaacagtaaatattttaggctttccagactacacaatctccaataaaactttatttaaaataataacaggcaggccatatttgtcccactggccatagcttggcaatctttttttaagaacagtctatgtagcattggtattatctaatatttgaaaaattcataaaattccattataaagtcatctgtgacttgtacttttgggtgggagtagtaatttaataactttctcattttcttaaactttctgtctccattggtatcactgttaataatttccctatgggattacccattttatgtaggcttttatatctacctgcttagagctgtgtaaaatgatttaactcaaaagtttaaaaatgtccttagttttagtatgatttcctcttgtttcgtgtattattctgtgtaagtttgttttctccctgtttttcttgattaggttggatgttggtttgcatattttgtttatgttctattcaaagaactagcatgttgattaatttataacatagcttacaatcagaactaactgaagttctgctcttatctctttatgtctgtttccttttgctttattttcttaatcgtttttctagctttctgtgtttcatattagatttatgtattttaatttataattctattgatatatgatttaaagactacaaattgtttttgataattattttcattatattccataaattctgatatatatatcactattttgatgtttatatgttcacctattttgatttgtattttctacttgatctaatagttgtttaatgaagagttttaacattttcaagtggaagaaaatttttctgaattttaaattatcgtgtcattattcatatgaaatgcataatacagtatactgctattggctctaccaattgtgatgattttctttaccagggtcattcagggttagcccttagtagagatgtaattgagcaacagtctgtaaccagctaatggcaaccaatcctctgacttgtctatgaagcaggcataacttctttcctcctctgtcaattggttttaggtatttccttccaatcccataagattatatatgtaggtcaagagggaggcatttttgcaacagatggaattctgggctcggtgtacatctaattcactaatagcttttgaaaagtcaaggctaacatcctaaatataccatgtctcccacccaattttatgactcagtgaatataatatgtaactcatgatggacagcacaggtaacatagtcatttggcattccatggttcagtctctacaagggcccaggagcatgtcaggagttgctttgaaaatggatagtaactgctatgactcctctagagggctttccaatagaacattttatctaccaggtgcattaagttttatcagatctataaaatcatacatcccaagtagtacagtagcttgcaaagcatctttgacttaggagacaaacactaccagctttttctctaggctttcactcaaaactggcagacttttgggtgatataaaaattagttggttcagtaatttcaaggacattataaactatgattcaaatccaaaagccccatcaagtgatgtgacactttcttaggggaagtaaaattgcttatgctttaatttagaggagatgctctgtatgccccagaccctaagaccctcaaaatcttcatatctggtacaggcccctggatctttgtggtattttcttcccatcctctgaaacatgaatcttatgagttataaaggtactcgccaggtctgctcactagatccagttagcattacataggcaaaaaagtgaattggtatactttccaaagaatgtccagacaatcaagattactgagaattatattatgactgagagcatgaaaaataacatagtcctggagaaagattttgaatttacactgcagtcctttctttcattcccctctgttgatgaatatggggtccatcccacatccatgtgaaaaaaagatttcactaaatatgtaactgtatcttaggtaccataggttgtgttgatctatacacataaaagctaggcagctgtgattgggactgtcacctggttatttttatagcgatgtactattaccaacctcaatctattttttttttttttgcaaaacctacacaatggaactcaacaatatgtattggtgaccactaccattatgtcattcaagtctaattgtgctaataatctctgcagttccttcagagatgctgtattgcttctgattacaatattggcagaggaagacagtttcaggagattccattttcctttcccactatgtgcctctaattacagggtaagcaaaccaatatgagtattattccagctactaagcatatctgtcaaattatacatttggagaaaataactgggtatgtctgcatacccactagatctactgtgagattagacttgggccaaaactccgtctatcaactgggtatttattccatatgtctcgcctctaactggaggaccataattgcttttttaaaaatttcccagtattaatgtctgctctgaccctatatctaacagtcctgaaaactaaacagttactcctgcaaacaatcacagatgtttctataattactatatgtacttattagagcatttcaggattctttttcagtgacaactagctccttttttaatcaatagattctgaatctgcaaactaacttatatttgaaaacctgatgagatattgtgattttccattttgatggtgactgtcaaaaattaaactactcttaatttttttctgatcatacaaggcaaacaacatcccagtcagcttcccaccttattttgctcctataaacatcatggtatattagccattaccatagattcctgcattgccactccagccttgctgcttattatggtaattaagcccatattgccagatggttaaattttgtgacctggcctctacaatccatgaatattatggaacctggctctcttgcatcaactcctactgtcaacaagggccttaaaagggacaaccactaccaagcttctcaaatatgctaatattttcctttctagggcatttcttattaggttaagtgaagacagtctcctcagaagcctcctagggaacacagtcaaaaggtgagttgccagaacaaacataatacattcattttaacattatcatcccctgatcccttctttaataccatacccaaagactctgacatctctactttatttactatatggcttttttttagtctaggcttcaaggagccatgccagcaaattactactaggaccatatccaagtgtccctgccaaagcaccgaatccaaaatcataagtaactgcccccataaaaataaaccctcctctaggcagcccccaagttcaagtccttaaaaaccactctaaacacatttcattggtgaatggcagtattagtcatatcctcaattcctttggtaggtattctatttctttcaaatatagtttatttattccttgaggaagatttatgcttctgtgttaggctgtgctgagatctgagatctgattctggttctttgcctggatgtaatgatactggaggtggtcttgtggggaaaaacatcatcatacgaggaaattattttaggtgaagtcattacacggtcacccagaaaagggaaactgttctcctccagaaatggtgaaagaggtacttctgctgaccagaagtgtttgaggaaattgggggttgctggggtttacaatattctcaggcttatctatataaatttttccatcccaggttaatggttgaatagtgctctcaaaaattcatgtgcacccagaacctcagaatgtgactttattcagaaatagaatctttgcagatgtaattagttaaggatttcaagaagaaatcattctggatttagggtgggccctaaatcccatcctaggcccaccctaaatccaatgactcctgttgttataaaaagaggagaagacatagagaagatcatgtgaaaatggaaaatgaaggcagagattggtgttatactgccacaagtcaaggaacatcaggagccacctaagctggaaaaggcaaggaagaagtctcccctagagtcttcagagggagcacggcctaactgacaccttagttttagacttctggttgttagaactaggaaaaaataaacttctttgttttaagtcatccactttgtggtcatatgttatggcagccataggaaactaatatacaaaggtcatactctttccttatcagggctctgactttaacaaatgagacctatcaaagttatgtatttggtctccttataagcagctcctgggcctatttttagcacagtcttccctagagctacatgaggtaggagttcctttaaatctactttagaggacttctgggatttggtaaatcagtaattaattgttctgagatgatgtaggaagaataaaggactcccaaagacacccacactctaatctttggaatctgtcaatatgttctttacataacaacaacaacaacataaaatattttataaaagtgaagaacgtttcccagttgtggtgagaaagaggcacaattgcggaagaagagtcagagagatactatgctgttggatttgaagatagacaaaggggctgcaagccaaggaattttgcagcctctgaaaaagccaagaaatcagattatcttctagaattactaaaaaggaatgcaaccctgcagataccttgatttttgcccagtgagacctgtgttgaacttctggcctacagaactgaaagataataaattgttttgttttaagctattgaatttatgataatttattttgacaatgggaaactaacacaagtgccctcaaaggaagttattttatttcatcatcattatgtaattatcattaccccatatcaattaaacaccatgactactttatctccctttatcttatctttctagcagagaaagattagtccctaatcacagaagaacatttttaaagtaactgtgatgtcactgcatggaagagtttaattcatttcacctggtaccttcaacaggtttgcttattttagacaggagacaacctaacttcaaaaatccaatactgagggtttacagactaggacaggagttggcaaactttttatgtaaaggccagatagtgaacattttaggctttgcatcccaactgctcagctttactcttacagcaagaaagcagccacagacatatgttaatgaatgagcatggctgtgttcaataaaacattttgagaaaacaggcagcatgccagatttggtttgtggctgtatttttcagtcccttatcgagaataattgtagtaactgttatcttaaccagaagtgtgtacaaaaaaagcttgaggcagggtttagtcctagtgtttaagggaggagtgcaatctcagggttgtaataataaaagaaagatgattcattatcactctactatttcatggggagaagcagaagagacatcactggtcaggtgtagcatggtcttgcaagaaatctccaaaagtttatgtgagaaaactatgactcaaattagccaaataataaggaggaagagaggaagaatttattacttgtctcttgcctaacattggtcaaggttttctccatgggaggttaacaccccctctcttcagaattgtgtcatttgacccctttggtgtgtgttatggaagccagattgaatgccttatgttgtagcacatcttctgaatccagaattaatgaaaggagccagagacctgggaatagctcaattaattttgccaaacatgaagtgaagcaaacagccgttgtttgggagagcatttgtttgggagacaagagaagctaagagaattcaagcagattcactcaatgctgtatcaaatcaatacaggcatctctcagctcaagagtacccttttgtattcgatagaccaatgcacagtttctttataaatgatatattgggggaaagatggcctattttctgattctatgacattatcttgattttttttttgagatggagtcttgctctgttgcccaggctggaatgcagtggcataatgtcagctcactgcaacctccacctcctgggttcaagcaattctcttgcttcagcttccaagtagctgggactacaggcgcatgccaccacacaaggctaattttttgtgtgtttttggtagagacagggttccaccatgttggccaggctggtcttgaactcctgacctcaggtgatccacccacctcgtcctcccaaagtgctggaattacaggtgtgagccactgcgcccaaccatattatcttgattttgtaggaaccttaactttagcagtttgttccttcttgcacttcaccaattagcttccaagggaagctttccccttccaagttgaatttatcccagaaatacaaatatgtttaaagttagaaaatctattaacataattcaacaaattaacaaattaagaaataataatcttgatacatgtagaaagcattcaataaaatttgacactattcataattttaaactcttagaatattggaaataggtggaatgtttttaacttcataaaagcaatcaaggacctgcaacaaccattttacttaatgctgaaatcgtggaggcatttcctttgaagttggaaacaaaaaaaagttcccactaaaaccatttttactcaacactgcactggggtcctagtcaataaaacaaaaaagatatatataaccataaatattggaaaggaagaaaatttgtctatattttcagtttttataaatagaatattccagagaatctaaggacagctattaaaaacaaaacattcaatgatgcaactgaatacaaaatattaaaaaatcaataatatttgataatctaaagataatcagttatgaaacttctttaagaagattaagtcacaagtcacaagagcaataaattctataaggtacttatcgaattgagctagcacaagatataaaagacttttataaaaaaatttatagttatatagcaaaacaaatgaaagccaaagtaaacatatttatagatggaacacccatatcttaacatgtaaattttctataagttatacactcgaatttcaaacaaaatcccaattgagaatcacattgagcttgataagctgattccaaaattcatatactagaataatgagtcagaaatagccaagataattcagaaaaagaaaagggaccagcttaccagatatcaagacattttgtaagttattataattaataaagtatgtcattagtacaatagtagataaataattcagcaaaaggttaagcctaggagaccaatccaaatattggaacttgatatatgagtgaggtgtataaatcagtgaaaaatagattcactatacaataaatgaattatttacatgtgcaaataaaagtctactatatcaaaccatcataaattacatgaagattaaaatctaattgtgaaatgcaaggtcttaaaaccaatagaaaaaaatagaattgtattttctctctggtagggaaatatttactgaataagaaacaaaaagcaagaatcacatgaaaagactgataaaactgcatatattaaaataaaaaaacttctgtgacaaaagactattgatggaaaaactgatatacaagaagtaaagtgatttattcaagattatatgctaataaatgctagagccacaactcaaacctatagttttctgatgccaatattcatttattttgcagtccttttaatttgtaattaaacaattgccacattatattctttcataaaaatttgaacaacacaaataaaataagaataactttgaccattttccccaattccaatctttagtgttctcccagatttgtctatattctttcaggcttttttttttcttaggcatttgaatatataagtacaaatataaaggcaatgttcaagtggttttataccttactgttctgcaacttttcttttaaaaaatgcgtcttaaagaactttccatatcaacacagcattccacagtatgaatacatcagcattcatttattcaatattctattaagagacatttagactattttaatagtttgcaccattagtcacataaacagtatagatatcggaaatgaattttctaggtcataacaaattccaaaaacgaatatatgttttaaatgttgataatgcttaattgctcatcctggtatatatacatatatttagatggctatttcccagtgctttttccattctctgatattttaaaattaatatttttagtgtttaacattttgtcggtatgatgttgacaaattgtatattgtatttccctaattactagtgagactgtttcctcctcactgccaaatccttctctctagaagtaagaggcaacaacatcaactcttaaaatcatcttttttggtaggcttattttcatatgtctaaatatgtttatattgctattttctgatttagtcattagatattatatattgatttcttactacaagatgaggatttagtacaagttctttatatattttacatgttcattatttttgacatgtaggaaatattacctcccactttgttgcctatctcttattatgagattcttgttatagcatatgccctaaagtttttagattttgcccaagagtgtccctactccacagtaactaacaaccctatcctacaagcatctttgaatactttctgagttgtaattttaatgtttattaaacattggttctttatgtatctatgaggcagaggtcttactattcttttcaaagtgaagaaccaattatccagtaccatttattcaatagctaattatgtcctcagacatcttctttaaaatatataacattttcccaaatacctgaactatttggggatttatctatttagatacattggtcctcttgtgtacccctgtaccaatataacactgtatttctttttcaaaaatgtcatggctattcgtatacattttcttttcttaataaattttaaaatcaccttttgaattcttaaaaaataaactctgacggcacctgattggaattacattgtacttgtggatcaatttgaagggatccaattttattccttgggtgggtggacttgcctttcaggtttgatttttgataggctaattcagtttctatcctttaaaaataaagaaccaaacctatatactaaataatttattaatattaattaattaatattaaaaatatctaattttcatgttttcaactgtttcctcaccatcaaaggcaaattatgaaataatcaaagtgaataagaattatttctgtagtctgataacattttatatattagtacatgttaatgaaatcaagattggctaatttatgttatttaatattggtcatttttcattaccaaactgagtaacaaaggcaaattataatcatattattaaattcaagcatagagtatttgaaaattaaagttgttctacatgttatcgttctcaaaatgccagaattaaataccgattttatctctcagtaaagctaaagacttaatttgggaccatcagtagcatgattcattcattcattcatttactcattcgttgattcaacacattttcattttacataatataaaatgctatcaactgggctagatactagatataaaataatagtaagaaacaccttttttcaagaatgaggaaaataaaactaataataaagatatcataatactcactttgccttcatctcttgggctatcgcttaaatgtacaactggacctggatgagtcttagtggatctgttaaatcaattcaaaacagtaattaaaaaccaaacattaaaataccttaccactagagactgaaacaaagaaattaagattacactggaataaaatcccaccattctagggttaagctcagattcacttaagttttttatttactttaccagtcctaactgcatttctgtttactaattgcaaactacttatttatgtttttctttaaaaatcgggttaaaacacaaagatcctaataacaatggggttctttattatttgaaacgtttgttgtcagataagcgcctctgaatttttttaattgaatttttatttacatagataaaagaacactacagctacaaaggtaatggtgtaaaactgtctcagttaaattgcaaagtacatacctgatttaagatttccttttacacgaaatctcctctgattattttcccctaaagaaaagtacagtggcacttttgatttaaaaataaatctactctagtgataacgcttttacagaaaaacaacaaattggagtgaaacctagttcattggttataccacacttatcaggttatttagtataataaataacagataattatgagtctaacagaatattgttaaaagacctgggctctctctatcaatctgactttaaatttattctactctcatatctggcatgtttctattataattcctagtttaacttacatcactttgaaaatgattatgtcatgattaaatatgatctgatctgatataacaagggttttattattgctccactttccacagcctttctccacgacctaacagtgtcaaattattcttatgattatattaacacagtttcagtttctttcttaagcacacatgaaaactatcaaagattctatacaaaacaatgaagaagatttaaatcttagaaactatttggaatcagagaaaagtgacaaattaattctaggatctcctggtgctgactcctcagagttaccaaggggaataaacacagattcattggatattgatgaattttgttagtggattcatcttaaatattttcatctaaaaatggaaatattaggactgaccttactgaataattgtgcagattagaagatacatacagcatctaatactatggcaaaacatagtgtgcattcaataaatagtatgtattatgattgatgtgataattggaaattagagttactatttgcattctagaatatatgcaggaagaaaagaaattaaacagggcttcataaaaagtttacagatatttctttaattttttccacatttatatgtaacatatcatttatacataaattcagtgttctataaaggtataaatgcctctgataaggtttaatgtctttaaattatcctccaggaattcataattgccaacaaaccatagcctctccgtctcttggtttgattgcactaacacttaccaaagtgtactttacgataagttagttgttctatattttaaaactttgggaaaccctgaattaaagttaaatattatttcccctacagaatttcttagagcctgtactatgcaaataagcattgtaaatcttcagtactttacaaaattattagtccattgaatcctttttcattgatcatattaatgaaatcacagaaatttgttttgggaaacactactcggatcacatgcaagactcttgtgtttagatccttaaactataaaatattctacttctgaaaataatctaacattaaacttccgttatttgtagttgctttttcagactctagaagaaacattatttactatcttaaacaaacatagaacacatcaaaagtgaagaggaaaaagggttcacattatttcactgcatagagataatgcctattaacattttggggtatttcttctggcttgttccctaacattaaacttccaaaaccacaaagcactcctggaaaaacttatggtcatgagaaattgacctaaaaataaaaaagcatctgtggactttggattctgaaaattacaaaaaaaattctttagatagaattatcaatgaattattttcatgtactagccacctaaaaaaatgtgcagtaattcttctcggtatccctatttagttctctttctcccattcactaaagtagccttcttaatattagtttccattatgggcttttcattatcttcccatatcttaaatattgatattctatggtatcctgtcctagactgccatgtattcccatataatatatgaccacaaattcaaaaccctacaggaatcaggcaggtattgcaaatgagttaaataggctgaataagaactgtaccaacctggatagcacattacccacctacataaggaaagttactactcatttgcagttgattattgccatacaggaatgttagactaggactgtttcaccaaaaagtccaaatttttatcttcattctaccaatttttaaataatagaaagtcataattcagagcatatttaaatgctctgatggccaaacaaaatatatctatgagtcataattagttcaatggctattagtttgctaacttttctctacatactctttatgcacaatttcatctgttcatctggttttaacaacccagtaaattctgatctctctcattaccttcagatccatatatatcccacctcttgctattcttctataccaactccacttgaaagtcttataaacacatacaattcaatggagctaaaattgaacttattattttactctcaacctactcaacctcttgcactttcactaaatggcaccattgtacaccattgctcaaggcaaacactgggaagtcatctttaatttttccctattattattccttcttttaaatatttctttaatatgttggtttatctccactcctacaacaccaacataatttttaccaagaacacagtctttctttctctccaattatttctccatacctgcattcagggtagtactcctaaaatatagatttgattgagatctgcttgcaaccgtcaaaatctagctccctattagtctttaaagtctgaacttatcaaattggcttacaagacctttcatgttataaaacctgattaccttccagctttatcccttgctatcctatccaccagccattccaacaaactataaactgcagtacttaaaatttctgggcacagagcagaaaattatcttatattccatcctttaaatattctgttccctctgcccggaatgttcttgtccctggtattttactcatctaactgaaactcaccccttggatctcagcatagatgtaacaatcttcacagataccactttgagatcccatgtctatattataatagatgtccttcttatggaattgccatattatattaccagtatattgtaattgcctttttatttaactttgcctccattaaactggaagtcccaggaggacagagattatgtcttctctgttcatagttgtttctagtatctatcatataatagagctcagtaaacatgcttgaatgatgttaaacatgagtcttacacttttatgatttgattataaatttcatgctcaaattttaatcatatgtggaaaaaaagcttacatttttttaaaatgttagggctgccctacagaaatagctgtttctatgctatcacctggtatatattttcccatataaatattttttaatgatagtttagttctatgctgttattttataaggtattcttcaaatatcactgtttaaatgaaaaatttgtcccaggttccaaataaccaatatatacattttggaaacccaactattcatactcttgggaattgcctctaattgcaattagaataattcactaaaaatagaaacaagctgaaaaataaacattaaatgaaaagtatttcaataaggacttaaaatagaaacaatctcatatttttttagataattcttgcatttgtcctacttagaaaatatattattaaaattcatggactaaaattatatttattaaatgagtcttcttaattaaatgcatattttattactgtcccatacacttgacacatattaacaggaagttacatacattttctaatgtatctcaagaggtagagagcaatgaaaagacagttccaggagattggaaattggcatttaaaatgttatctgtcacagtggaattagaattctatggaacatatttttggaaatccggtctaaatgaatcaagagacattcaggaagtgatggtatgtggtttactaataatttctcagagatatttcaagaacattttcagaggcatgtacaactcgataaaacacaggtttatatataaaatagtagatgctattctaatgctgaatcatgtgtatattatgaaaaataaaaatgccttattttagctctttaatttctcctgattttagcctcccttataatatacattttaaaaactcttcattagtcttgaaattgtatagactatataaacacattaaaataaagtataagtcactagttcacgtagtaatctgaaccatgaaaaggatttgttacataaatgaatataagaacagcattgcaagagtggtgaaatgtttaatttgcttaagataacaaattcttctcaattactttagcagcattcaacctgaacacaagtgatgcatctatatattttcactaatattgaatttatttaaaagttttataactgaatcttctcttgttcatctaagcctgtatgtttttatcaatatcctgaaacaatattatgtaaaactattaaaattcagcccttttattgcttttataggactaggattacaggggaaaaggaccctcccaaatacctaataaagtaactttggggggaaacataattatttataggattaatgtttttagaaatattcacacagaacaacaaaatgagcaaaatagctcacaccaattatcttgaaaacataaatgaaagttgtaagtcaatagcagtgtatatgtaacaatttatcatactaatgcttcaataatgtcatcaatcatttagtatttactttggaaagcacagaaataagccaagtatgaagaacaagaaaagaacaataaacaaaaatcctgctctggagcagttcctaatctaatgagggagaaagaattatcattaataaaagacccattcagacataatacaaaaggagtatcatgacaagagtataactagtaacaaccttccttatgaagcaatatacatgcatattgaaacattaagattaggtaaaatatttatttccagcgtcaagcttcacaaaaatagggtgttttaatcagaattttgcagaataattttgtaacttagactatatatgaggcagaaaatgagtcaacttcaagtcaaacatcttatcaaggacctaatatgtagagagcataaacgtgttaaataaaagttgtttttctgattaataattttactagaagaattgcttacgtatgtactacaaatagatggtgatatagtttggatatttgtccctgcccaaagctcatgttgaattgtaatccctaaatgttcaaggtggggcctagtgggaggtatttggatcatgggaagtggatttctcttgaatggtttagcaccatccccttagggctcttcttgtaatagtgagttcttgccatagtaagtgagttcttgcagtagtgaatgaattctcgtgagatcttgttgtttgaaagtgtgtggcacctccccctaactcctcctcttgctcctgctttcattatatgacatgcctgctcctaacttctaccatgattgtaagcttcctgaggcctccctggaagctaagcagatgccagcaccatgcttcctgtaaagcctgtagaaccataagccaattaaacctcttttctatataaattaccttgtctcagggattcctttatagcaatgcaaaatggctgaatacagatggcttgaaattccacagagtttgatatttggagaatttcacatttcacatgtacagaaacttaaatatcagtgccaaagccaaagtggtaattgccatcaatcatacacccaaaaaacctatgtataacgtaacctaaaagatatttgagccctgaacaatattttaatgaggcaagaaaagaacaagctacaagcattaaaatcatatgcagtgatcatgattatttttacataacacaattcattctcactgaaagttgctatactaagcttgattataatgaagtgagatttccatgtataacttttagaataagccttactattttgtcatcacatttttagatataaagcttaattatttatggtatttggaaagcctaaaatattgtaatatctatttttaaaagcttttatggctttaagttattttactgaacttttcactcaaattcattataaattagtaatagacgtatcaaataactgtaatttgacctacatgttacataactgtatgaagtatttaagccaataaagtgatatccaagttcaaacttacagttcaattgccttgttccacatgataacatatccagaaagaatgaaagattcaatatttacaatatgtgtatttcctctttctgttccaacataaagccatttactctggaaaggtagatgacagtaagtaattctgaaagaaagaaaattataattaaaatatctaaattttacatttggtcagcattatattttccttacatgtattatgtagtgatagctatataaataataaaatgtactatatactcaagtatagcatgtagttattcattgagagtataggataaataatattatagcgttaaaaacaataatgttaataagcactattaataagtgcctatatgggcattaatttacattatttctaattctgaaaacagcaagacagatatgtatttctgttttacaaaaatgaaactgtggctgaatttttttgtttacttgcctaagaccgctaataagcagcaaaaccgggattcaaatcctttcctgtttggttacaaaattaacatctttcactaagctacatttttttctatttttaagatcatatttgcttcaaatacatgaatttcatattatatttcgtaaacttaatatttacttcaaatacataaaggtcatatttgcttcaaaacataaatttcagagttcacagagaagtggtagctatgtctacatgagatgataaattatttagtttttattcagatgtttgacatataagcagtaaaaagaaaacttataaagtcagagcttcactgtatttttcccttcattttattgttctgttttcatcttcacaatgggctctctgactagctctaggacctgttccatagccagagcaatcatgactcctacatattaaatatgggaatttaccagagtcctctattcacaacattatcactccttctagtttggcctaatcatgctttttagttactccacaaaagagaaggaggataagttcatagttatctcttgtcagacagaccaataaatttttcaaaaaaaatgtgaatgacatatttccaatatgatattgtcttgtacttctttatataagaataaaaaggccaggcgcggtggctcatgcctgtaatccaagcactttgagaggccgaggcaggtggatcatgaggtcaagagatcaagaccatcctggccaacatggtgaaaccccgactctactaaaaatacaaaaaattagccgggcgtggtggtgggtgcccatagtcccacctacttgggaggctgaggcaggagaatcacttgaacccaggagatagggttaccatgagccgagactgtgccactgcactccagcctggtgacagagcaagactctgtgtcacaaaaaaaaaaaaaaaaaagaaaaagaaaaaagaataaaagtgaacatccagtgtgtccaatttatattctcagtctggttcactgaagttttcaacagtctgtttctttgaaccaaacttcatatattattcaaagtaccctgcacactacattcaaaaaattaaaagctctgctattacataagcaattactattgacaatagtaattgtgtagcctatatgatgttggaaaattttgattaaaacctaaaatctagaattgctgttgccaagagatatttaataatgttgcacaggaaataacttgatggtcatgtttcaaggcaatgaagaatcaattttcaattcaatcttaggtagaaagaggaaacttactttaaagaggactaagatcatcctttctgaattacagggacagtggaaaaaacactaatcccattaaagaagacataaatataggggttcaagtagaaaaaaagcaaacctcaatattacatagtcacttccagggttaagaagaaaagtgtaagaactaccaggtttcagtaatgagacagaactagaactattccttgaactagtaactacttttttcctcatccttattaaatagaaactagagcctttatatcagacaggtttcaccttatattcaatgtccaactgatgagtagtggttacaacaactagataaagattttcaggttttaactgaacccccccaaaaagagtaacaggattacttagaatgattgccatagataaaggaaaagatatactaacacttctgctgtatatttgctagctctaatatatgattagtcaatacctttatacaacttaatttattgtattttataattacactttcatttgtaacttatttctaccaccactacctgatagatgaaggattttttctactgcatgtaagccttggaaaaataatcttattcctatatcaatattaactatcattaaataatcgaagatatccttagctttccatccattcatccatttattcaatcttcaccgaataactctttataaaaaaagtattgttgccgggagggaccaagatgattgactggaaatagctgcggtcgaaggctcccaccgagaagaatgaaaacggcgagagaagaacgaaaactgcaagtgaatcccgcaccggcaactgaggtatccaaattctctcattgggactgaataggcagttggcacaacccacagagagccagcaaaagcagagtggagcaacggcccacctgggagctgcaagtaacaaggggaactcccactcccagccaagcaaggtggtgagtgtgctacctaccaccaggaaaaccatgctttttccacgaatctgtgcaacctgcaaatcagaagatcccctttgtgagcctatgtgaccagggccttgggtcccaagaacagagctgtgcagattcttggcggtcgctcagctagagactaagattaccaagttcctgaggggaggggcagctgccatcattgcagctgcctgttgcctaagatgactgagtcctggggggaggggtggcagccataaatgcagctccattctgccactttttccctgctggtgcgagggagactgagcggtttggactcaggaggaattctccacagtgtagcacagcggctgtggtggatcatggccatactgcctctttaagctggaccctgacccattcctcctcactggatgggggcctctctgcaggaatttcagaaactccagctagggatttacagacagaactctgatctccctgggatagagccccttgcaggaggggcagccatggtctctctccatggatcagtggacttagtctttcccccgatggctctgcagaacctgggaagtgcagatgagtgggattcctcccaccacagtgcaccccctctgccaaagcccagccagagtgcttcgttaagtggattcctgatcccatgcctcttgactgggtgaaaccccccaacaagggtcaccagacaccttatttaggaccattcctgctggaataaggttggtgcccctctgggatggagctcccagagaaagtagcaggcagtcatccttgctgttctgcagcctccactggtgacaccttcaggtgtgggagggacccaggcaaatagggtctggagtggacccccaacaaaccagaagaggggcctgaccgttaaaagaataacaaatagaaagcagcaacaacattaacaaaaaagtcccctcaaaaaccccatccaaaggtcagcagcctcgaagaccaaagctagataaactcataaagatgagaaagaatcaatgaaaaaacactgaacactcaaaaagcagagtgcttctcctcctccaaattattgcaacacctctctggcaagggcacagaactgggcagggctgaaatgaatgaattgacagaagtaggcttcagaaggtgggtaataatgaacttcactgagctaaaggagcatgttctaacccaatgcaaagaagctaataaccatgataaaacattacaggagctgttaaccagaataaccagtttagagaggaacataaatgacctgatggagctgaaaaacacaacatgagaacttcacaatgcacccacaattattgatagccgaatagaccaagcggaggaaagaatttcagagcttgaagactatcttgatgaaacaagacaggcagataagattaggaaaaaaaagaaaaaggaatgaaaaggaatgaataaaacctccaggacctatggggttatgtaaaaagaccaaacttctgactggttgaagtacctgaaagagacagggagaacagggccaagttggaaaacgtacttcaagatatcatccacaagaacttccctaacctagcaagagaggcccacattcaaattcaggaaatccagagaaccccagtaagatattccataagaagatcaacccccaaggcacataatatcagattctgtaaggtcgaaatgaaagacaaaatattaagggcagccagagagaaaggccaggtaacctacaaaggcaagtccatcagactaacagcagacctctcagcagaaaccctacaagccaaaaaagatcaggggccaatatttaacaattttaaagcaaagaatactcaacccagaatttcatatatggccaaatgaagcttcataagtgaaggagaaataaaatccttttcagacaagcaaatgctgagagaatttgtcaccaccaggcccatcttgcaagagctcccaaaggaagcactaaatatgaaaacaaacaagcaaacaaacaaacaaaaaactgttaccagctactacaaaaccacactgaagtacaaagaccaatgactctataaggcaactacatcaacaagtctgcaaaataaccagttggcatcatgatgactggatcaaattcacacataacaatattaaccttaaatgtaaatgagctaaatgccccaattaaaagacacagaatggcaagctggtaaagagtcaagacccattggtgtgctatattcaagcgacccttctcacatgcagggacacacataggctcaaaataaaaggatgagggaaaatctaccagcaaataaaaagcagaaaaaagcaggggttgcaatcctagtttctgacaagacagactttaaaccaacaaagatcaaaaaagacaaagaagggcattacataatggtaaaaagttcaattcaacaagaagagctaactatcctaaatttctatgcctcacttcaagagcaacgaaatttataaaacaagttcttagaaacctacaaaaagatttagactcccacaataataataggaaactttaatatttcactgtcaatattagatcattgacacagaaagttgataagaatcttcaggactcaaactcagctctggcttaagttggtctgggtatctacagaactctctatccaaaaacagcagaatatacattattttcagcaccacatgggacttactctaaaatcaatcatttaattggaagtaaaacgttcctcagcaaatacaaaagaactaaaatcataacagtctctcagaccatagagcaatcaaattagaactcaagattaagaaacacagtcaaacccatacaactaactggaaatgcaacgacatgctcctgaatgactcctgggtaatgaaattaaggcagaaatcaagaagttctgtgaaaccaatgagaacaaataaacaatacactagaatctctgggacacagaaaaagcagtgttaagagggaaatttatagaactaaatgcccacatcgaaaagctagaaagatctcaaatcggcaccataatatcacgactagagaaccaagagcaaacaaaccccaaagatagcagaaaacaagaaataaccaagatcagagcagaactgaaggcgatagagacatgaaaaacccttcaaaaaagtcaacaaatccaggagctggttttttgaaagaataatgaaatagaccgctacctagactaataaagacggaagaatcaaattgatacaataaaaaatgataaaggggatatcaccactgaccccacagaaatgcaaacaactatcagagaatactataaacaaataaattagtttatttgcactaatttatttgcatactatgcaaataaattagaaaatccagaggaaatggataaattcctgaacacatacagcctcccaagactgaaccaggaagaagttaaacccctgaatagacaaataatgagttctgaaactgaggcagtagtaaatagcctaccaaccaaaaaaagcccaggaccagactgatttatagctgaattctaccagaggtacaaagcggagctggtaccatttattctgaaactacttcaaacaaattaaaaggaaggactagtgcatcaatcattttatgaggccagcatcatcctgataccaaaacctggcagagatacaactaaaaaagaaacttcaggccaatatcctgatgaacatcaatgcaaaaaccctcaataaaatactggcaaaccaagtccaacagcacatcaaaaagtttatctaccacgatcaagctggcttcatccccgggatgcaaggctggtaacaacatattcaaatcaataaatgtaattcatcatgtaaacaaaactaaagacaaaaaaccacaggattatcttaatagatgtagaaaaggccttttataaaattcaacatctcttcatgttaaaaactctcaataaactgggtattgatggaacataactcaaaataataagagccatttagaacaaacccacagccaatatcatactgaatgagcaaaagctggaagcatttcccttgaaaaccagcacaagacaaggatgccctctctcaccactcctattcaacatagtattgggagttctggccagggaagtcaggcaagagaaagaaataaagcgtattgaaataggaagagaggaagtcaaactgtctctgtttgtagataacataatcgtacatatagaaaatcctatcgcttcagcctaaaagcttcttaagctgataagcaacttcagcaaagtctcagcatacaaaatcaatgtgcaaaatcacaaccattcctatataccaacaacagacaagcagagagccaaatcatgaatgaactcccattcacaattgctacaaagagaataaaataactaggaatacagctaacaatggatgtcaaggagctcttcaaggagaactacaaaccactgctcaaggaaatcagagaggacataagcaaatggaaaaaacattccatgcccatgggcaggaagcatcaatattgtgaaaatggccatactgcctaaagtaatttaaagattcaatgctatttccattaaaataccactaacattcttcacagaattagaaaaaactactttaaaattcatatggagccaaaaaagagcccatataaccaagaaaattctaagcaaaaagaagaaagctgcaggcaccatgatacccaacttcaagctataccacaaggctatagtaaccaaaacagcacggtactggtaccaaaacagacacaccaatggaacagaatatagatctcagaaataagaccacacatctacaaccatctgaactttgacaaacctgacaaaaagaagcaatggggaaaggattccctatttaatatatggcactgggagaactggcaagccacattcagaaaattgaaactggatcccttccttaaaacttataaaaaaattaactcaagatggattaaagacttaaatgtaaaaccccaaactataaaaactctggaagaaaatctaggcaataccattcaggacataggcacgggcaaagatttcatgatgaaaacatcaaaagcaattgcaacaaaagcaaaaattaacaaacgggatctaattaagctaaagagcttctgcccagcaaaagaaactaatgggagaaaatttttgcaatctatccatctgacaaaggtctaacatccagaatctacaaggaatttaaacaaatttacaagaaaaaaaaaacaaagaatccattaaaaagtgggcaaagacatgaacagaaacttctccaaagataacatccatgcgtccaaaaaacatgaaaaaaagttcaatatcactgatcattacagaaatgcaaatcaaaaccacaatgtaataccatctcacttcagtcagaatggtgatcattaaaaagtcaagaaacaacagatgctggcgaggctgtggagaaataagaatgcttttatactgttggtgggaatgtaaattagttcaaccattgtggaagacagtgtgacaattcctcaaagacctacaaccagaaatactatttgacccagcaatcccattactgggtatatacccagaggaatataaatcattctatcatgaagatatatacatgcatatgttcattacagcactattcattataccaaagacatggaatcaacccaaatgcccatcaatgatagtctggataaagaaaatatgatacatatacaccatggaatactatgcagccaaaaaagaatgagatcatgatctttgcagggacaaggatggagctcaaagccattatcctcagcaaactaacacaggaacagaaaaccaaacaccgcatgttctcacttattaagtaggagctgaacaatgagaatacatggggaacaacacacactggggcctgttggcggaggttgggagggagggaaagtgtcataataaatagctaatgcatgtagggctcaataccgatgtgatgggtttgttaggtgcagcaaaccaccatgacacatgtttacatatgttaacaaacctggatgtccttcacatgtatcccagaactttaaattaaatttttaaaaatgtattgtcccagattatacacacacatccgtttttcttcaaatcatactatctaacaggagagacaaaacaagcagacaagtaagaaaaataaaactaaaatgtaataatttctatagactccaaagaaggaagagattaattacagtaagaaaaatcaagaaaagctaatgtagagagttgtgtttcaattgggccattaatgatcaaaacacaaaataaataaatttttctcactttgaaaaatgggcagacctttgaatttgtttatattctttacttttgacttactcttagaaattttacttaggtataaaaacaaaataaaatataaatttttcacacttatggctctttacacacataaaacaaaaattccaaattaattacaaaaaactacaaccagaatttaaatcaatattaattaatgtgacgttgaattttttttacagaaataaaataacctcaaaatatgaatatggttctaactgcacaggttctattgagtttcatgtgtccatacttagtttgtaccttttcactatatttatctattctaacagcttttttttaaatcaaaagttatttaaggaatctccatactgtttaccagagtggttgtagtagtttacattcccaccaacagtgtagaagtgtttccttttcaccacatccacgccaacgcctattctttttattttttaattgtggccattattgcaggagtaaggtggcatcacattgtggttttgatttgcatttccctgataattagtgatgttgatcattttttcatgtttcttggccacttgtacatctttttatttatttatttatttatttattttgagacagagtctcactctgttgccaggctggagtgcagcggcgtgatctcggctcactgcaacctctgcctcccaggttcaagcgattctcctgcctcagcctcccaagtagctggaactacaggagcacgccaccacacccagctaatttttgtatttttagtagagatgggctttcaccatgttggccaggatggtctccatctcttgacctcgtgatacacccacctcggcttcctaaagtgctgtgattataggcatgagccactgtgcccagtccacttgtacatcttttgagaactgtctattcatgtccttagcccactttttgatgggattatttgtttttattttttttcttgctgatttgtttgagtttattgtaaattctggatatagtccgttgtcagatgcataggttgccaagattttctcccactctgtgggttgcctgtttactctgctgattttttcttttgctgtgcagaagctttttagtttaactaagtcccatctatttatctttctttttgtcgcatcttggtcatgagctctttgcctacaccaatgtctagaagagtttttccaatgatatcttctaggatttttgtggtttcaggtgttagatttaagtctttgatccatcttgagttgatttttgtataaggtgagagatgaggatccactttcattctctatatgtgacttgtcaattataccagcaccacttgttgaattgggtgttctttcccactttatgtttttgtttggtttgtcaaagatcagttggctgtaagtgtttggctttatttttgggttccctatttagttccatttccctacatgcctatttttatatcagtacaatgctgttttgttaactatagttttgtagtatagtttgaagtcgggtcatgtgatgcctccagatttgttctttttgcttagtcttgctttggttatgcaggctcttttttggtttcacattaattttaggattgttttttctagttctgtgaagaatgatgatggtattttaatgggaattgcattgaatctgtagattatttttggcagtgtggtcattttcacaatattgattctacccatccatgagcatgagatgtgtttctacttgtttgtattctattatttcttgattcttttgtcaggatattatttgttacctaccatataagttaaaattataacatttttattatcttgcctggatcaggcaagaaaaatatatggtcaaaagatttcatgagcagtcataaattcatatgatgattgacatatagaagatttactattgtaataaacacttcacagatactatgtaccagcatgtagatgctacagacacatatcatctgacacactcatagtccttcagaaattcataattaaaaataatttgacagaactgaatgataaatatttattattttcgttcacttacgtaataccctgtctgcagtaaatacccaaacatatttcttcactaaaacttaagtggcaaaacactaagaactttgttttgaagactgttacttaattttctttatctgttcttaaaataatcacctaatcatctaattttctctaacttttctcttaaccaacagaagtcatttgtaatgcaagcattttatgtcatatgtactaagctttatattctctatactgtcttatctttttatatattcatatatgtttattttgtggtttttaaaaataatttcaacttttattatagattcaggaggtacatgtataggtgtgctgcatgggtatattgagtgatgctgaggtaagcacagtacccaacagtcaattcattaactcttgccccctagtagtctctagtgtctatttttgccatcttttatccaagtacatccaatgtttagctccgatgtatacttgagaacatgtgttgtttggttttctgttcctgtgtaaattttcttaagataatggcctccagctgcatccaaatagctgcaaagaacatgacttcattttctttatggctgcataatactctgtagtgtatatgcaccaattttcttcctccaatccactgtcaaggggcacctgggttgattccatgtctttgatattgtgaatagtgctgcaatgaacatacatgtgacattttggtagaacaatttatttttctatggatatatacccagtaatgggatttctgggtcaaatggtagctcagttttgtttgtgaaatctccaaactgctttccacagtaggtgaactagtaacattcccaccaaaggtgtacaaacattcctttttctccacagctttgccagcatttgtggtttttagactttttaataatagccattctgatgggtaggagataatatctcattgtggtttttgatttgcatttctctgatgattagttatgtggggtattttttcatttttgttgaacacttgtatgtcttcttttgagaagtgtctgttaaggtcttttgcccaatttttaatggggttatgtgtttcttgcttgttgaattatctaagtaccttatagatcctggatatttgacctttgtttgatgcatagtttgtaaacatgttctaccattctgtagtatatctgtttcttctggtgacagtttatcttgctgtgcagaagttccttagtttaattaggtcccacttgtcaatttttgattttgctgtaattgcttttgaagacctagtcataaattctttcccaaggccaatgtccagaatgatatttcacaagatttctaggattcttatagtttgaggtctgatatttagagctttaaaccctcttgagttaatttttgtgtatggtagaggtctagttcatttttctgcatatgggtagccaagtatcacagcaccatttattgaatagggagtacttttcccattggttatttttgttgactttgtcaaagatcagatggctgtaggtgtgtggctttatttctgggttctctattctgttccattggtctatctctctttgtatacctgtatgatgctcttttggttactgtacacttacagtagtatagtttgaatcaggtaatgtaatgtgtctggctttgttctttttgcttaggactgatttggctatttgggctctattttggttccacatgaatttataatagtttttttctaattctgtaaagaatgactctggtagtttgataagtatagcattgaatctttacattgctttgggaagtatggccattttaacaatattgttcttccaatccataagcatgaaatatttttccatttttttgtgtcacctatgatttctttcagctgtgttttgtgcttctccttaaagagatatttcatatcttgggttagatgtattcctaggtattttttgcttgtgactattgtatatgggattgttttctttgtttggtttgcagcttgaacattattggtagatagaaatgctactgactttgtatccggaaactttactgaactcatcagttccacgagcttttcagtggagtctttagggttttctaggtatagaattatatcatcagcaaaaagacatagtttttcttcttcttttcctagttggatgccttttatttctttcttttgcctgattgctctgggtaggacttccagtactatgttgaataagaatgttgagagtgagcatccttgtctcgttccagttctcaaggggaatgctttcagcttttgcctgttcagtatgatattggctatgtgtttatcataaatagctcttaccattctatggtatatattccttcgttgcctagtttgttgatgtttcttattatgaagagatgttagattttatcaacagcattttctgtgtaaattgagatgatcatatggtttttaaatctttttatgttgtgatttattgatttgcatatgttgaatcaactttgcatcccaggaatgaagcctaattgatcatggtgaattaactttttgttgtgttgttggattctttttcttagtattctgctgaggatttttgcatctacgttcattggggatattggcctgtattgtccttttttcattgtgtctttgccaggttttggtatcagtgtgatactggcttcataaaatgagtaataaaggaggtccctcttccctgaattttggaataatatcagaagaactggaaccagctttctttgtatgtctggtggaatttgactgtgactccatcttgtctggagctttttttttgtttggcagatttttcactactgatttaattttggaacttgatattggtctgttcagggtttcaatttcttcctgattcattcttgggaggctgtgcttccagggatttatccgtttcctctagataacgtagtttgtgtgcatagaggtgttcatagcagtcttggaggatattttatgtttttgtgggatcagttataatgtcacctttgttgcttctgattgcttatttggatctttcctcttttttttctttgttaatctagctagtgttctaccaatatttattctttcaaagaaccaactttttttttttgtcgatatattgtgtggattttggggtcttaatttcatttagttctgcactgattttagttctttcttttccgatgctagctttaggattagtttgttctcgtttttccacttcctctagatttgatgttagatcattaatttgagatctttatgactttttgagacaggcatttagtactataaactttcctcttaacattgcttttgttgcatcccagagattttagtaagtcatgtctctgttttcatttatgtcaaataatttcttttatttctgccttaatttcattgtttaccaaaagtcaatcgggagcaagtttttaagattttcatgtaattgtgtggtaataaaagatcttggtattgattatttttattccactgttttctgagagtatgtttgatatgatttcagtttgtttgagtttattgagacttgttttatggaccaggatgtggtcaagtttggagtatgttctgtgtgcagaagacaagagtgagtatcctatagttgatgggtggagtattatgtagacatatattagtttcaattaggtcaagtgttaaatttaatccagaatttcattgttaagttttctgcctcaagcatctgtctaacgctgccaatggggttttaaagacctcactcttattgtgtagctgtctaagtctttttataggtctaggggtacttgttttataaatctgggtgctccaatttgggtgcatatatatttgggatagttaaattttcatgtcaaattaacccctttatcattatgtaatgtccttctttatccttttatacggttgttggtttaaagtctgttttatctgatatgagaataggaactacttttttgttttcgatttgtgtgacagatatttctccaaccctttcctttgagcctgtgggtcctgttaggtgtgcaatgggtctcttgaagacagcagagagatgagtcttgcttttttcatctaccttgccactctatgccttttaagtggggcatttttaaggactgcaaatacttgaaagcttttccacattccttaaatttgcagggttttcttgcagatgcacagcaaggcttggagtcagggtgaagacttttgcaaactaattaaactaaggaagctcctgtccaatagaggttttcttctgcagagtatggatgtcttttctacaccagttacactcagaagtgttccctctattctgagctctcatgtgtgtcatattgattgatattggtctgttcagggtttcaatttcttcctgattcattcttgggcataagtgttcactgaagttttctctacaattcttacaatcacagagttcccctctattgtagcttcttgaagaactccactctgaactgtcttcaactctttttattgtaaccaagagatcaggctgtgtataaagagctgaaatcttactgagcccaggtgcttgcagttctccagtatcatgtatctgcagaggtatctctgaatcatgtccagtaaagttcactcctctgggtgaactccatagtcatatcataaaagttcactgaaccctgataccaatttggcagacagtcacccaccaacctttctattatatctttgtctttttctcataaaggcagattggttccctggtaaggaagccacaggacaaatcaatggctgccatgctgtgaggctgatggtgaaatgtacctgaattctccctttattgataccaagatcattttggggaagcttacgaatgtatatagatagaggcaatctctatctctctctatatatacagggttatttggagtccagaatgcaccagaattgcaggatctgtgaggtgggaggatgctggggaccatgataatgtgcctgaaatggagaaaattattttctttctggaaaaaaaaattcacaataacttccttggaggcttttgaagggagtaaagtggatgctccctacagacatgccaattataaactggattccttgtagggaacaatggccagagtggtcttttgaacctggccacatcaggaggacccatcatccttgcagatgcaagtggagcaggccaggccaaccctacaaaggtattcccgacaaaacttgaactttagcattccattccacagctgagccacttcatttctctggcctcataatacggtttgagtgtgtgtcccctccaaatctcatgttgaaatgtgatgtctgatgttggaaatgggtatagtgtttgggtcatggaggcagatctctctgccttgatgactaatcttatagagtcagaactcactcattatcatgaggacagcaccaccatggcatggtactgtcttcacgataatgagggagttcttaccctgtaagttcatatgagacctagttgtttaaaagaacctggcacctcctgcctctctctcttgctccctgtctaaccacatgatactctgctcctccttctccttccaccatgattgtaagctttcagaggtgctcaccagaagcagatgctgacatcccacttcctgtacagcctgcagtactgtgagccaaaatacatatccccttctactgaaaaagggcagtcatcaaacaatctccaccaattttcaaaccaactctaaaaaacatatcaagatattagataatataatgtgctttccacatttcttgatatcagtaccgtaggttgaacagaaaattatactaatagggatacatagaaaattctgcattttcatttaaaaaacatcaactgctaaagtatatgattgaaaaactgtttaacaatggttaaaatagaaaaaaaaatgggagtattgcttggctttacgttcaacgtaaaccaacagtataacccctctataaccaagattacaaaattaaatgtaatcttaagtataatatattcagtaatggcatccattgtattagatcacatttcaattagttccatttgatatgcaacaagcttaaaaaatactggcaaacaaggggatagctggcaaaatggccgaataggaacagctctggtctgcagttcccagcgagatcgacacagaaggtgggtgatttctgcatttccaactgaggtacccggttcatctcactgggaatggttggatggtgggtgcagctcacggagggtgatctgaagcagggtggggcatcgcctcacccaggaagtgcaagaagtcgggaaattttctcccctaaccaagggaagccatgagggactgagcctgaggaagggtgcacactccagcccagatactgcatttgtcccatggtctttgcaaccccgcagaccaggaggttccctatggtgcctaccccaccagggccctgggtttcgagcacaaaactgggtggccattagggaaaacactgaactagctgcaggtgtttttctttccataccccagtggctcctggaatgccagcaagacagaaccgttcactcccctggaaaggggtgctgaagtcagggagccaagtggtctggctcggtgggtcccacccccactggcttgaaattctcactgccaacacaacagcagtcagagatcaacctgggacaattgagcttggtgtggggaggggcatccaccactggtgcagcttgagtagccagttttaagctcacagagtaaacaaagcagccaggaagtttgaactgggcagagctgagcaaggctgctgtggccagactgccacatttctcctctccgggcagggcatctctgaaaaaaaggcagcagcccccataagggacatatagacaaaacccccatgtccctgggacagagcacctcggggaaggggctgctgtgggcacaacttcagcagacttaaacatccctgcctgacagctctgaagagagcagtggactcccagcagagtgtttgagctatactaaccatcagactgcctgctcaagtggatccctgacctccatacctcctgaatgggagacacctcccagtaggggctgacagaaacctcatacaggagagctctggctggcaactggtaggttcccctctgggacaaagattccagaggaaaaaacaggcttttttttttctttcgctgttatgcagccgcccctggttatacccaggcaaatagcgtctgtagtggacctccagcaaactccagccaacctgcagcagaggggcctgactgttggaagaaaaactaacaaacagaaacgaatagcacatccactcaaagaccccatcagaaggtaaccaaaatcaaggaccaaaagtagataaatccatgaagatggggagaaaccagtgcaaagtggctgaaaattccaaaaaccagaacacctcttctccacgaaagaatcacagtgtctcgccagcaacagaataaaactagatggagaatgagtttgattaactgacaaaagtaggcttcagaaagtgggtaacaacaaactcctccaggctaaaggagcatattctaacccaatgcaagcaagctaagaagcgtgaagaaaggttagaggaggaggtggttccaagatagccaaatatgaacagctccagtccacaactcccagcatgagtgatgcagaagatgggtgatttctgcacttccaactgaggtaccgggttcatctcactggggattgtcagacagtggggggcaggatagtgggtacagcccaccaagcaagagccgaagcaaggtgaggcatcgcctcacccaggaagcacaaggggtcagggaattgcacttcctagcccagagaagcggtgacagacactaacaaaaagaaaggacaaccacaccaaaaccccatctgtacgtcaccatcattgaagaccaaaggtagataaaatcacaaagatggggaaaaaacagaggggaaaagctaaatattctaaaaatcacagtgcctctccccctccaaaggaacacagttcctcaccagcaacagaacaaagctggatggagaatgactttgacgagttgagagaagaaggcttcagacgatcaaacttctccgagctaaaggaggaagttcgaacccatcgcaaagaagttaaaaaccttgaaaaaagaatagacgaatggctaactagaataaccaatgtacagaagtccttaaatgacctgatggagctaaaaaccatggcatgagaactatatgatgaatgcacaagcttcagtagccgattcgatcagctggaagaaaggttatcagtgattgaagaccaaatgaatgaaatgaagcgagaagagaaggttagagaaaaaagagtaaaaagaaatgaacaaagcctccaagaaatatgggactatgtttaaagatcaaatccacatctgattggtgtaactgaaagtgacggggagcatggaaccacgttggaaaacactctgcaggttattatccaagagaacttccccaacctagaaggacaggccaacattcaaattcaggaaatacagagaatgccacaaagatactcctcgagaagagcaactccaagacacataagtgtcagattcaccaaagttgaaatgaaggaaaaaatgttaaggcagccagagagagaggtcgggttacccacaaagggaagctcgtcagactaacagcggatctctcggcagaaactctacaagccagaagacactgggggccaatattcaacattcttaaagaaaagaattttcaacccagaatttcatatccagccaaactaagcttcataagtgaggctttacagacaatgctttacagatatgctttacagacaagcaaatgctgagagattttgtcaccaccaggcctgccctaaaagagctcctgaaggaagcactaaacatggagaggaacaaccagtaccagccgctgcaaaatcatgccaaaatgtaaagaccatcgagactaggaagaaactgcatcaactaacgagcaaaataaccacctaacatcataatgaaaggttcaaattcacacataacaatattaactttcaatgtaaatggactacatgctccaattaaaagacacagactggcaaattggataaggagtcaagacccatcagtgtgttgtattcaggaaaaccatctcacgtgcagagacacacataggctcaaaataaaaggatggaggaagatctaccaagcaaatggaaaacaaaaaaaggcaggggttgcaatcctagtctctgataaaacagactttaaaccaacaaagatcaaaagggacaaagaaggccattacataatggtaaagggactaattcaacaagaagagctaactatcctaaatatatatgcacccaatacaggagcacccagactcataaagcaagtcctgagtgacctataaagagacttagactcccacacaataataatgggagactttaacaccccactgtcaacattagacagatcaacgagacagaaagtcgacaaggatacccaggaattggactcagctctgcaccaagcggacctaatagacatctacagaactctccaccccaaatcaacagaatatacatttttttcagcaccacatcacacctattccaaaattgaccacatagttggaagtaaagctctcctcagcaaatgtaaaagaacagaaattataacaaactgtctctcagaccacagtgcaatcaaactagaactcaggattaagacactcactcaaaaccgctcaactacatgaaaattgaacaacctgctcctgaatgactactgggcacataacaaaatgaaggcagaaataaagatgttctttgaaaccaacgagaacaaagacacaacgtaccagaatctccgggacacatttaaagcagtgtgtagagggaaatgtatagcactaaatgcccacaagagaaagcaggaaagatccaaaattgacaccctaacatcacaattaaaagaactagaaaagaaagagcaaacacattcaaaagctagcagaaggcaagaaataactaaaatcagaacagaacttaaggaaatagagacacaaaaatcccttcaaaaattaatgaatccaggagctggttttttgaaaggatcaacaaaattgatagacggctagcaagactaataaagaaaaaaagagagaagaatcaaatagaagcaagaaaaaatgataaaggggatatcaccactgatcccacagaaatataaactaccatcagcgaatactacaaacagctctacgcaaataaactagaaaatctagaagaaatggataaattcctcgacacatataccctcccaagactaaaccaggaagaagttgaatctctgaatagaccaataacaggagctgaaattgtggcaataatcaatagcttaccaaccaaaaagagtccaggaccagatggattcacagccgaattctatcagaggtacaaggaggaactggtaccattccttctgaaactattccaatcaatagaaaaagagggaatcctccctaactcattttatgaggccagcatcatcctgataccaaagccgggcagagacaaaaccaaaaaagagaattttagaccaatgtccttgatgaacattgatgcaaaaatcctcaataaaatactggcaaaccgaatccagcagcacattaaaaagcttctccaccatgatcaaatgggcttcatccctgggatgcaaggctggttcgatatatgcaaatcaataaatgtaatccagcatataaacagaaccaaaggcaaaaaccacatgattatctcaatagctgcagaaaaggcctttgacaaaattcaacaactcttcatgctaaaaactctcaataaattaggtattgatgggacatatctcaaaacaataacagctatctatgacaaacccacagccaatatcatactgaatgggcaaatactggaagcattccctttgaaaactggcacaagacagggatgccctctctcaccactcctattcaacatggtgttggaagttctggccagggcaattagacaggagaaggaaataaagggtattcaattaggaaaagagaaagtcaaattgtccctgtttgcagatgacatgattgtgtatctagaaaaccccactgtctcagcccaaaatctccttaagctgataagcaacttcagcaaagtctcaggatgcaaaatcaatgtacaaaaatcacaagcattcttatacaccaataacagacaaacagagagccaaatcatgaatgaactcccattcccaattgcttcaaagagaataaaatacctaggaatccaacttacaagggacgtgaaggacctcttcaaggagaactacaaaccactgctcaatgaacttaaagaggatacaaacaaatggaagaacattccatgctcatgggtaggaagaatcaatatcgtgaaaatggccatactgcccaaggtaatttatagattcaatgccatccccatcaagctaccaatgactttcatcacagaattggaaaacactactttaaagttcatatggaaccaagaaagagcccgcattgccaagtcagtcctaagccaaaagaacaaagctggaggcatcatgctacctgacttcaaactatactacaaggctacagtaaccaaaacagcatggtactggtaccaaaacagagatatagaccaatagaacagagccctcagaaataacgctgcatatctacaactatctgatctttgacaaacccgagaaaaacaagcaatggggaaagtattccctatttaataaacggtgctgggaaaacaggctagccatatgtagaaagctgaaactggatcccttccttacaccttatacaaaaattaattcaagatgaattaaagacttaaatgttagacctaaaaccataaagatcctagaagaaaacctaggcattaccattcaggacataggcatgggcaaggacttcatgtctaaaacaccaaaagcaatggcaataaaagacaaaattgacaaatgggatctaattaaactaaagagcttctgcacagcaaaggaaactaccatcagagtgaacaggcaacctacaacatgggagaaaattttcgcaacctactcatctgacaaagggctaatatccagaatctatgatgaactcaaacaaatttacaagaaaaaaacaaccccatcaaaaagtgggcgaaggacatgaacatacacttctcaaaagaagacatttatgcagccaaaaaacacatgaaaaaatgctcaccatcactggccatcagagaaatgcaaatcaaaactgcaatgagatatcatctcacaccagttagaatggcaatcattaaaaagtcagggaacaacaggtgctggagaggatgtggagaaataggaacacttttacactgttggtgggactgtaaactagttcaaccattgtggaagtcagtgtggcgattcctcagggttctaaaactagaaataccatttgacccagccatcccattactgggtatatacccaaaggactataaatcatgctgctataaagacacatgcacatgtatgcttattgtggcactattcacaatagcaaggacttggaaccaatccaaatgtccatcaatgatagactggattaagaaaatgtggcacatatacaccatggaatactatgcagccataaaaaatgatgagttcatgtcctttgtagggacatggatgaaattggaaagcatcattctcagtaaactatcacaagaacaaaaaaccacacaccgcatattctcactcataggtgggaattgaacaatgagaacacatggacacaggaaggggaacatcacattctggggactgttgtggggtggggggaggggggagggatagcactgggagatatacctaatgctagatgacacgttagtgggtgcagcacaccagcatgtcacatgtatacatatgtaactaacctgcacgttgtgcacatgtaccctaaaacttaaagtataataataaaaaaataaaaaataaaaaaaattcataccatctgaggcactaattgtgtccccatgaagtaaagctaaactgtacatgatcaacaatgttattagtacaaataaatgaccaaaaatgattactcttaggtacaaaaatttttagacaattcagatctgtatatacctcctttagagactttaaaatattttaatcataattaactaaactcattccctttctgttccacaggagcaaaagccatgatttctggcagaggtatggaagtctattttcatgctcctgaacaacagaaataatattttctacatctatatggataaaatatttcaatttctgaatgagaattgggttagtagaatccatttgaggagcagtaaggaggtactcttattcttccttgtaagaggggtaaaagaggaggcatagtggagagccaaaaatcccaccccacccagcagctacaaggtgtctctccctatctaagatgtcagtgagtttaaatggagcacctgaacttcaattcccacctatcattaataacacaacatctgaccttcccctgccagaccaatgtcaaatacaaccacctaaaaaaggggtttaaataaaaactgaaacctcataacaatgcctggaatgtccaggttttaatttaaaaatcacttattataataggaaatagaaaaacctcaatttgaatgaaaaaaggcaatagttactagcagcaagatgacatagatattagaatttgctaacaaatatttaaaagaagtaatcatgaaaaggtttcaacaagtacagacacatatgaaacaaataaaaatataaagtataagcaaagaaaaagtaagtaaaaagaaccaattacaaattttactacttaaaatataatgaagaaaatttaaaattctgtggataagctaaacaccagaataacaaggacagacataagagccagtggcctagaggatgtaataatatttattcaccaatctgaaaaaacaaataatataagtaaaaaaataccagagcttcagaaacctatgggacaaaaccaatagatctatcaatcatattatcaggataacggaatgaaaggaaaagaggatgagactgaaaaagcagttgaataaacaatggctaaaaaatgcaagaagctgagcaaaactaaacggaataaacccagagaaataaacagtcagacaaatcacagccaattatctgagataaaaacaaggaagaaaagaaaaaaaaaatctttaaagcagcaagagaaaaaacaacaccttaactatgggagaaaatttccaatgacagtagatttctcatcagaaaccacagagaccaggaggaagtagaatgctattcaggtgtataaaatgaaaaacaaagaaaaactaccaacctagaattctatattaagcaaaattatccctcaggtatgaagaaattatgacattatcaggtaaaggaaaactaaaaattttttctttaaaagaccaataaaaaattgctttatggagttttctaaacagaaaaatatctaatagaagaaacttttaaaaatcaagtatgggaaaaaagagacagtaaaaatataataaatgtactatgtatatactaagtgtatttatatatttttttccttctcctcttggagcttcttttttttttttttttttttttttttattatactctaagttttagggtacatgtgcacattgtgcaggttagttacataggtatacatgtgccatgctggtgtgctgcacccactaacgtgtcatctagcattaggtatatctcccaatgctatccctcccccctcccccgaccccaccacagtccccagagtgtgatattccccttcctgtgtccatgtgatctcattgttcaattcccacctatgagtgagaatatgcggtgtttggttttttgttcttgcgatagtttactgagaatgatggtttccaatttcatccatgtccctacaaaggacatgaactcatcattttttatggctgcatagtattccatggtgtatatgtgccacattttcttcatccagtctatcattgttggacatttgggttggttccaagtctttgctattgtgaatagtgccgcaataaacatacgtgtgcatgtgtctttatagcagcatgatttatagtcctttgggtatatacccagtaatgggatggctgggtcaaatggtatttctagttctagatccctgaggaatcgccacactgacttccacaatggttgaactagtttacagtcccaccaacagtgtaaaagtgttcctatttctccacatcctctccagcacctgttgtttcctgattttttaatgattgccattctaactggtgtgagatgatatctcatagtggttttgatttgcatttctctgatggccagtgatgatgagcatttcttcatgtgttttttggctgcataaatgtcttcttttgagaagtgtctgttcatgtccttcgcccactttttgatggggttgtttgtttttttcttgtaaatttgtttgagttcattgtagattctggatattagccctttgtcagatgagtaggttgcgaaaattttctcccatgttgtagtttgcctgttcactctgatggtagtttcttttgctgtgcagaagctctttagtttaattagatcccatttgtcaattttggcttttgttgccggagcttctaaattatatttgatggttaaagctgaaataacatagtctgatgtggttcataatatatatagggaaaaacaataaaatttattataaatgagagaagtaaagggaagtaaagaaaggaaaagtctctgcatttcattcaaactggtaatttgtagcagcagtagattccagtaagttgtttgtatataataaaatacctatagcaacctctttaaaaagtgatacaaagaaatacactaaaattaactaataataagtcaaaatggaattctaaaaagtgttcaattaaaccacagaaaggcaaggggaaaaaagcagagcaataacaaatagaacaaccaaaaaacaaaaaataaaatggagaacctaagccctaatatatcaataattatatctaatgtaaacattaattaaaatatatagactgacagaatgaattaaaaaccatgacccaactatacgcttgtctataagaaatacactttgaatatattaacatagctaactttaaagtataagaatagacaaagatatatcgtgcaaacatgaatcactagaaagaagacactatattatgttagataatgaaaatttcacagtaaaggaaattatgagatagagagggacaccaaataataataaaatggtcactctaccaagaagatatagcaaccctaaatgtgaatgcaccaaacaggctgcaaaatacattaaataaaacatgacagaactgaaaggaggaaaaagaaatccatgattcttgtaggagacttcaatacctctctctcagcaattattagaacaactaaagagaaaatcagtaaggatatagaatgcaagaaaatcataaccctatagaatctaatcaacttttacagaataatctgtcaacaacagcaaaatagacattatttttctagcatacacagaacatacacaaagatgagctacatcctggggttgaaaaacaaacctcaacaattttaaaataactcaagttatataaaatattttctctgagtacaatggaatcaaactagaaatcagtaaaagaaagatacaataaaatctccaagtacttggaaataagaaaaacacttccaaacacagtcatgcatcacttaacaatgggcataagttctgagaaatgcatcattaggtgattttatcatagtgcaaacatcgctcttatatagagtgtaagtacttacactaacctagatagtacacctttttatacagatagattacatggtacaggttgagtatcccaaaacccaaaatccagagtgcttaaaaatccaaaactttttaagcattaacatgacactcaaaggaaatgctcattggaacatttaggattttgaattttcaggtttgggatgctcacctggtaggaataatctcaacattccaatattcagaaaaatctaaaatccaaaacacttctggtctcaaacattttggataaggaatgcacaacttgtatagcctattgctcctaggctacaaacctgtaccgtatgttactgtagtgaatactgtaggcaattgttacataatggtaaacatttgtgtatctaaatatttaaatatagaaaagggcaatgcattgtgctataatgttacaatggctatgaacgcatgaggcaatagaaatttttcagcttcattatcctcttttatatgtagtccatcattgaccaaaacatgataatatcatgccttattgtaatctttgtgtctaagaagtcacaataaaatttttaaaaatataatgaactgaataaaattggaaatataaacatttgtcagatatagctaaaagactgccaagagggaaatgtgtagtgctaaatacatttaaaaagaaaaaagtctttaatccatcttgggttaatttttctataaggtataaggaaggggtccagttttaattttctgtatgtgtctagccagttttcccagcaacatttattaaatagggaattatttccccattgcttttgttaggtttgtctaagatcagatgtagatgtgtggtcttatttctgagatctttattctgttctattggtctatgtgtctgttttggtaccagtaccatgttgttttggttactgtagccttgtggtatagtttgaagtcagtgtggtgcctccagctttgttctttttgcttaggattgtcttggctatgtgggcccttttttggttctatatgatttttaaagaatttgtttctaattatgtgaagaatgtcaataatagtttaatgggaatagcattgaatctataaattgctttaggcaatatggccattttcataatattgatccttcctatccacaagcatggaatgtttttacatttgtttgtgtcctctctgatttccttgagcagtggtttgtagttcttgaagtgctccttgacttcccttgttagctatattcctagatattttattctctttgtagcaattgtgaatgggagttcattcatgatttggctctctgtttgtctattgttggtgtatatgaatccctgtgatttttgcacatttattttgtaaccttctcctgagactttgctgaagttgcttatcagtttaagaagctttaggctgaggctatagggttttctagatataggatcatgttatcttcaaacagagacaggttgacttcctctctttctatttgtaaaaccaaaaactattaaaatcctagagaaaatccaggcaataccactcaggacataggcccaggcaaagatttcacgacaaaaacgtcaactgcaactgcaacaaaaacaaaaattggcaaacgggatgtaattaaactaaagagcttctgcacagcaaaagaaactatcatcagcatgaacagaaaacctacagaatgggagaaaatttttgcaatttatccatctgacaaaggtctaatatccagaatctataaggaatgtaaacaaatttccaagaaaaaaaccatcaaccccatcaaacagtgggcaaagaacatgaatagacacttctcaaaaaaagacatacatgcggttgacaaacacatgaaaaaaaaagtcaacatcattgatcattagagaaatgcaaattaaaattagaatgagatactatctcatgccagtcagaatgatgaccattaaaaagtcaagaaacaacagatgctggcgagactgtggagaaataggaatgcttttactctgctggtgggaatgtaaattagttcaaccattttaaagagtggaagacagtatggtgattcctcaaagatctaggaccagaaataccatttgacccagcaatctcattactgggtatatatccaaaggaatgtaaatcattttattataaagatacatgtatgaatatgtttattgcagcactattcataagagtaaagacatggaatcaacccaaatgcccatcaatgatagactgaataaagaaaatatgttacatatacaccatggaatactatgcaaccataaaaaggaatgagatcacgtcctttgcagggacatggatggagctcgaagccattatcatcagccatgtatcacaggaacagaaaaccaaacaccacatgttctcacttataagtgggagctgaacaatgaaaacacgtggaagaaggaggggaacaacacacactggggcctgttgagggtaggcggggagggagagcatcaggataaatagctaatgcatgcagggctcaatacctaggtgataggttgataggtgcagcaagccaacatggcacaagtttacctatgtaacaaacttccatgtcttacacatgtatcacagaacttaaaataaaataaaattacaataataataagaaaagtctcaaaccagtaacttacctcctgtctcaacaacctagaaaaagaaaaccaaaataaacacaaactgagcagagtaaaaaaaaatagtaaagagcaaaaatcaacaaaattgaaaacaaaaagaatagagataatcaatgaatgacaaagcagtttccttgaaaagttacataaaatagaaaaatctctagtaggagatttttttaggagaaaaaaagaaaaaacagtgcaaacatcaggaatgaaacaatgagtattgctacagaccatgcagctttgaaaatgataacaactccacacaaatacatttaacaacttagatgaaatgaaaaaattcctcagaaactgtaaactagcacaataaccccaactgaaataggctgaatatccctgtagctactaagaaaattgaatttataatttccaaatttccaaaaaagaaatttccacacactcatgatttggctagagaattttaccaaacacttaaagaataattgacaccattttttttttttcttgagacagagtgtcactctgttgcccaggctagaatgcagtggtgcaatcttggctcactgcaacatctgcctcccaggttcaagcaattctcctgcctcagcctcccgagtaactgggataacagacgcctgccatcacgtctggctaattttttgtatttttagtagagatggggtttcaccatgttggccaggctggtcttgaacttgtgacctcaagtgatctgcccacctcagcctcccaaagtattggaattacaggcgtgagccactgcacccaacaattgataccaattttaacaatctcttccagaaaatacaagagggaaaacgttcaaatttataaataaagactacctgagaacaaaccagataaattcagtaaaataaagaaaactacagactaatatccctgatgaatagaaatgtaaaagtgattttttttgtttttttggttgtttttttgagacagagtcttgctctgttgccaggctggagtgcagtggcgaaatcttggctcactgcaacctccacctcccaggttcaagcaattctcctgcctcggcctcctgagtagctgggactacagagcacgccaccacacccagctaatttttgtatttctttttagtagacacggggtttcaccatgttggccaggatgtcttgatctcttgacctcgtaatctgcctgcctcagcctcccaaagtgctgggattacaggcatgagccaccacgcccagcccaaatgtaaaagttcttaacaaaagattactaaatagaattcagccatacatttaaaaacaagagaggcttattccagaaatttatggctagctcaatattcaaaaatcaatcaatgttgttcactaaataacaagctgaaacagaaaaatcatcagttgatgcagaaatagtatttgacaaaattcaaaacccaattacaataaacctcaaaaacaggattacaaatgtatatatacacacacactgtcatgtccctcctgcttacacatgtactccattctcctatgaaacttcatttaaaaaacatggattcagagataaaattaccaagaatttcaagatggtcagagcagagtatttaaccaagcattggcccttattagtacagaccttggtccaatggaatgggtcccaagcagataaagctgcctctgcctgaaacttactagtgagttcagcaaagttgcaggacacaaagtcaacaaaaattaattgtatttctatatatcagcaatgaacatgtgccaaacaaaatttaaaaataccactcacaatcaaaaaaatacataggtatagatctaacatgacatgtacatgatttgtatgccaaaaaaaaatgatgaaagaaatcaaagaagatctaagtaaatgtagagacatactatgttcatgaattggaagactcaacataagcaatgatataaattctccccaaagtaatatacagatttaatgtaattcctatcaaattatcgcaagatttttttttgaaaagtaaaaaaacttattctaaaatttaggtagaaagccataggaactagagtaactaagacaattttgaaaaagaataaagttggaagaatcagtatatccaattttaaagcttactgtatggttacaataattttaaaagtgtggtattggcagagggacagacacataaaaatagaaaaaaataaagaatcttgaaatagacccatacagcctgtctgatttgaacagccagaacacttggacaagagtaaggctgtgaggctgatagctttcctgctagtctggcaggggagctgaggtagctcccactctttgccctgataaagcctctccacacctaattgagagctcccccagccaacttaataaatactgggcctctgcccaccattggtagtatgtctcctcaacctgccttagctacaaccagtgcctagccaggaataccacccctattggcctgaaggttgaatcaccaattcagtaaataaaatactagggaaaaattaaataagtaaaaaaagtatacactatgagagaacaagataagcttcaagagatccctgccattctaaccccctaggagacagtaaacttgcccatataccaagtatataactactacaaccagcatctgggaaaaccagcagacaaagactataactaagtaactcatacagagtcttcacccgtaaaagcaccaagaaccaaattcagctaaaataaactacaaacattaaagtttgatccttaagagcagaaagaaatttaaaaaacaccacaatccaatcaaaactaaattcaagaacaatttgaagaaatagtttacccaaggaaataccagaggaaggtaaaaaacaacacaaagaaattttttaaaaatacaggatatggataaaaaattttccagagagatagcataaagaaaaagaactacaacttctggaaataaaatacacacttagggaaatataaaatgcactggagagtttcaacaatagactagaacaagtagaagaaagaatttcagaggtcagagacaaggcattcaaattaacccaatcagaaaatgaaaaaaaaagaattaaaaaaataaagtctccaagaaatatgagattatgttaaacagccaaacctaaaattaactggtgtcctgaggaagaagaaaaatctaaattttgggaaacatatctgaaggaattattgaggaaaactttgctggccttgatagggatctagacatccaaatacaagaagctcaaataacttatgggaaattcatcacaaaaaaattatcagcaaggcacacaatcatcaggctaaacaatgtgactacaacaattactactgaagtcaagatggagaaaagaatcttaagagctgtgagacaaaagcatcagataacctataaagaaaaacctataaggttaacagcagatttgtcagcagaaaccttacaagccagaagggattcaagccagaagggattgtggtcccatcttccacctccttaaacaaaataattgtcagccaggaatttggtatccagcaaaattaagcttcatgaatgaaggagagataaagtctttttcagacatacaaatgctgagagaatttgccactaccacaccagcactacaagaaattctaaagttctaaatcttgaaacaaaacctcaatattcaccaaaatagaaaccccttaaagcataaatctcacagggcctataaaacaataacacaatttaaaaaaaaacaaagtatttaggcaactaacatgatgaatagaacaatacctcacatctcaatactaatattgaatgtaaatggcctaaaaactccacttaaaagatacagaatggcagaatgaataaaacaccaccaacccaatatctgttgtcttcaagagactcatctaacagataaggactcacataaacttaaggtaaagagctggaaacatgttccatgccaatggaaaccaaaaatgagcagaactagctattcttatatcagacaaaacagactttaaaacaataacagttaaaaaaaagacaaagaaggacattatataatgataaaaggattagtctaaaaggaagatattacaattctaaatttatatccacctaacactggagctcccaaatatattaaacaattagtactagacctaagaaataaaatagacagcaacacaataatagtggggcacttcaatactccactgacagcactagacagatcatcaagacagagagtcaacaaagaaacaatagacttaaactataccctagaacaaatgggcttaacagatattaacagaacattcttcccaacaactgcataatacattcttctcatcagcgtggggaacattctccaagatagaccatgacaggccacaaaataagcctcaattaatctaagaaaatcaaaatcatatcaagtatcttctcagaccacaatgcaataaaactggaaatcaactccaaaaggaaccttcaaaactatacaaatcatggaaattaaataatacgctcttgaattatttttgggtttgaagaaggaattaataaaatcaactataacttaatagtagcagtaatagaaattttaaaatcctcttaaagttgctgcaaattgtgaccctcccttaaactcaagttaaaaaggaatattaacagcctgtcttctcgctgtggacagtgaaccttatctatactccacaactccacattcctgaaagtttattacaggcccagtgagttcctgcatggctgcagtgtcacaagaccaataagtttaggttgcaagacatgtttctctcaagatgtaagaaatgttgtaatgctgcctttgtttcttgcatctgtaactcacttcctgcctcacatagttcccaccttaagatgtttaaaagtaggaaaagccctttcttcagggctcagactttctggacatatgtccggctgagccggtgagcaccttaataaactttcctccaccttttttggtctctctgagtggtgacagcgtgctggcagcccttgcagccctcactcgctctgggcgcctcctctgcctgggctcccactttggtggcacttgaggagcacttcagcccaccgctgcactgtgggagcccctttctgggctggtcaaggccggagctgtctccctcagcttgcaggtaggtgtggagggagaggcataagtgggaactggggctgcgcgtggcaattgcgggccagctggagttctgggtgggcatgggcttggcgggccccgcactcagagcagccggccagccctgccggacccaggcaatgaagggcttagcacctgggccagcggctgcggagggtgtactgggtcccccagcagtgctggcccactggcattgcacttgatttctccccaggccttagctgcctccctgtggggcagggctcagaacctgcagcggggcagggctcagaacctgcagctggccatgcctgagcctcccccactccgtgggctcctgtgtggcccaagcctccccaaagagcaccaccccctgctccatggtgcccagtcccatcgaccacccaagggctgaggagtgcgggcgcatggcacgggactggcaggcagctccacctgcggccctggtgcaggatccactgggtgacgacagcggggctcctcagcctggtgggaacttggagaacctttatgtctagctaagggattgtaaacacaccaattggcactctgtatctagctcaaggtttgtaaacacaccaatcagcaccctgtgtctagctcagggtttgtgaatgcatcaatcgacactctgtatctagctactctggtgtggacttggagaacctttatgtctggctaggggattgtaaatacaccaatcagcactctgtatctagctcaaggtttgtaaacacaccaatctgcaccctgtgtctagttcagggtttgtgaatgcaccaattgatgctctgtatctagctcctctggtggggacttggagaacctttgtgtctagctaagggattgtaaatacaccaattggcactctgtatctagctcaaggtttgtgaacacaccaatcagcaccctgtgtctagctcagggtttgtgaatgtaccaatcgacactctgtatctagctattctggtggggacttggagaatctttatgtctagctaagggattgtacatacacaaatcagcactctgtatctagctcaaggtttgtaaacacaccaatcagcaccctgtgtctagctcagggtttgtgaatgcaccaatcgacactctatctagctactctgatggggacttggagaacctttgtgttgacactctgtatctagctaatctagtggggacgtggagaacctttgtgtctagctcagggattgtaaacgcaccaatcagcacccggtcaaaacagaccactcggctctctgtaaaatggaccaatcagcaggatgtgggtggggccagttaagagaataaaagcaggctgcccaagccagcagtggcaacccgctcaggtccccttccacactgtggaagctttgttctttggctctttgcaataatcttgctgctgctcactctttgggtccacactgcctttatgagctgtaacactcaccgtgaaggtctgcagcttcactcctagccagcgagaccacgaatccaccagaaggaagaaactccgaacacatccaaacatcagaaggaacaaactccgaacactccgcctttaagaactgttaacactcaccatgaaggtccgcggcttcattcttgaagtcagtgagaccaagaacccaccaattctggacacatctccagtctttgattgccccgtaacatttctggggacccatccgggagtggagacagaagattttctgttttgacagggtgctgattcggatgaaactcacaccctaactgacaccagatgcaggtggggctcgtgaattggtcagaaaggaaaactgtttcagggacagaggaagtgtgtgaaagtgtgtgaaagagatggtctcaggagagaccaacatagagcgtgacgctgggaggcacagacctcttatcatggactgtgtgctccaaggagagtatgggaaaaaccagacctaggacactgcatacagtccatagaaccagttccacagctgcagctagctgtgacaggaattaaggcactctccgggctaagtagtatcaaaacctcctgtaataggacccagtctggtggatccaaaagtgaaactgagagtgaaagcatgccatgagggaggaaatgggaggaaaagcatcaaagcctactccactggagtgcatgctgaaaaactttaaaaaaggttttaatggtgattatgatgttaacctaactccacagaaactgagaaccctttgtgagatagactggccatctcttaaggtagggtggccagccaaggggaaaatagacagggagataattggccgagtgttttgggtggtcaccaggcttggagaacagcctgggcacctggatcagtttccacatatcgactcctggctaagtgtaattcagacctgccctgagtggctgcagggcactgcagcctactttaagacctactgtaagactctaatggcctggacaaaaccaggaaccacagaaagagactgcaaggcatcagaaaaagaaaaggagtcatagaaaaagcagaaaaaaaccatcttacaggccccacctgaagagttagaaagtccacccccctatgcaccaatttatccatccctgacaaggcttagacaggaggctgccccagctgcctacagaggctcagactcagaagaaagcaacaccatgcagagaggagccagagcccttgcctgaaaagccaagggaggaactccaaggggatgaggtcggctgccttaggtcgggccatgcccaagcaatgcaggtgcccctccgagaaacacagaaacaaatttatttgaatgcacagaatgaagtccaaggggcagaacagctcttcgtttatcagcccttctctactactgatctcttaaattggagacaacatactccctcctatacagagaagcctcaggctcttatagatctaatgcagtccattttcctaactcacaatcctacctgggctgattgcaaacaacttcttctgtcattatttaatacagaagagcactgtagagttatacaagctgctctctagaggctggagaacaatgcacctgcaggcacaggagatatcaggcagtatgcacaataagcactcccaatagacgctgacccaaactgggaccctaaccaggctcaagggctacaaagtttggagcagtatcaagaggcactcctaaatggaataaagcctgcagggaaaaaggccaatatcagaaaggtctcagaggtccaccagagccaaatgaaagtcccagtgaattttatgagagactctgcaagtcttactggctttacacgccatttgacacagaggctgcaggtaatcagtgtatggttaatgcggcatttgtaagccaggtgcaagaagacataaagctaaagcttcagaagttagaaggttttgaaggcatattaccaagcttatacaggtggctactaagatgtttgtaaatcaagatgaggaggccaagagagaagctagatgcagagccaaggaaaaggcagacttgctggcagcagccttagttggaagagaaaccggttttgtgagaggacgtggtcatggtcacagtcatggtagaggactagctaggcaaaaccagtaagctaagccagaacaagggggctgacctaggattgagaaagatcaatgtgtgaaatgcaagcagatgggacactggaggaatgaatgtccagagagagaaaaggatagaggcaacaatcaaggacaaaacggctggccagaaccccctgccaccagtcaaggggttcagaagtcagatatggatttaatcagagtggcaggaatcaatgattattatgaggactgagacagactgggttccacttcattaggccccaaggagcctatggtctcaatggaggtagagggccaaaaagtggactttatggtcaatactggtgcagagcactcaggagtaactcaagcgattgggccattgtctaaaaattatgtcaatataattggagctacaggagtaacagaggccttacttcaaatctacaagatgtgtgattggaggacagcaggttcaacatgaatttttatatttgccaaattgtctggtgcccttgttaggaaaagccttgctccagaaattgcaagcacaaatctcctttacaccgtaagggggcacgactctaaacctaggtcaaagaaaaggcatgataatgacccctactgtcccaacaacaaaggaatggagactctatgagagatgcaaaatttataaagatgcattttgccagcgggaaaatgaggcaatgtataagaaattatttctcaagctgccaggggtctgggtggaagacagtcccccaggctagccataaatcaggcacatgtagtggtggaactgctgcggggcacttacccagtgtgaatccgtcagtatcccatcccagcagaagccacccatgggattacaaagcatatagactggctccttaaatttgggataatgcaaagatgtgccttgtcttggaacactccattggtaccggtgttaaagccctccagagattaccagccagtaaaggatttgcgggccataaataaagttgcagctacattatatgccattgtgcccaacccatatacaatgcttgggtgaattcctgtggatgctgcttggtttacatgcttagacataaaggatgcattcttctgcatccaacgagctcctgaaagccagggcatctttgtctttgagtggggctcatcacagtatacttggaccaggctcccccaaggattcaaaaaccccccaatcatttttgaggaagcactagacagacctgaaggcttttgtgccaccaagtgacccctgtgtcctgttgcagtacatggatgatgtattgttggctgcacccacaaaagaagagtgctttcaaggcacagaaagcctccttcgtgttctgtgggaggctggctataaggtgtctaaggaaaaaggcacaaatctgtggccaaagggcaagatatcttggctttaacatctctcaggggcagcatgagcttggacatgagtgaaaagagaacatgtgtggcattcctctacctgacactaggcgacaagtgcaggagcttttaggggcagatggtttctgtcacatttggattccaaattactcgcttttggcaaaaccattgtataaggctaccaaagctggggcgggggcaggggggaagaatccctcctgtgggaaaaagagcaggacatggccttcaaagacatcaagaaggctttgatccaggccccagcattaggactgccagacatgacaaagcctttttacctgtatgtccatgaaagaaaaggaatagctacaggaatcttggtacaaacactagggtcatggtactggcccacggcatatttctccaagtgtctagacctggtggctatgggatggccaccctgtttcaaggcattggcagccactgccctgttagtggaagatgctaacaagctcacatttggacaaaggttaataattcgggtgccccacatggtcgtgtcaccctgatggagcagagggggcatcactggctatctaaccctaagatgttaagatatcaagggcttttgtgtgaaaacccctacataaccctggagactgtgaacactctaaatccagccacactgctgccaacagaatgggtggagcacggaaagccccattgtgtggcccagggtatcactgttgtgtggaaacagtggatgaggttttatcaagccaaaaaaacttaacggactagcccttaagagacccagatgttaaatactttactgatggaagcagcttcatatctgaaggtgtcagacgggctggatgtgcagtggtaacactgaattcagtagccgaagcccgccctctgccagtcggaactttggcccaaagagctgagctaatagctctcactagagcattgctcttagccaaaggaaagtcagtaaacatctatactgactcaaggcatgcttttgccactttgcatgcccacagagccaaatataaggaaagaggattattaactactgaaggaaaggaaatcaaaaataaaaaggaaatagagaagctcttagaagccgtatgggctccaaaagaagtagcagtcatccattgcaaagaacaacaaacaggaggaggtgacaaggctagaggaaacagaaaggcagacagagaagccaaaagagctgtaatgacagaggtaactaagaaggaaaaggaaacccttaccatgcccttactggagcttcccctaacagaactccctaactactcttctaatgaaaaggcttcgtttgagcaggagagtggaagttaccagaaaggatgttagtggaagttctcagatgggaggcttgccatcgcagaagcaatagccccccggttcataaagcagtttcatcaaggaaagcatatgggaaaaactgcattagaaactcttataggacgacatttctatgtgctgctcccaactgccatcactcaagccgtttgtgagcaatgcttggcttgtgcccaaaacaatccatggcagcggccaacacggcccccagggattcaagaaactggagttataccctgtgaaaacctgcttgtggactttatggagctgcctcaagccagaggctactggtacatgctagtgtttgtctgcactttctcagggtgggtgaaggcatttcctaccaggaaagagaaagctcaggaagtaaccagaatcttactaaaggacattattcctaaatttgaactgcctttaactttaggaacagacaatggcccagcatttgtgacagaaatagtacaacagctaatgcagatgttaaaaatcaaatggaaactgcatacagcttatcgcccacaaagttctggaaaagttaaaagaatgaaccagacactcaaacagctgttaaagttttgccaagaaactcatctaaggtgggatcaggtgctgcccatggtccttctctgagccaggtaaacccctactaaagtaactgggtattcaccctatgagatagtgtttggccaagcacccctgatgataactcagataaaaggtgatttaagagaatctggggaattaaccttaagaaggcaaatgcaagccttaggtgaggccatacaggaaatataagggtgagtaagagaaagaatacctgttagcctcacagatgcagtacatcccttccaacctggagactctgggtcaaacaatagaacccaaccactttagggcctttatgggatggtccccatattgtgatcttgtctatccgcacagctgttaaagttgcaggtatcataccttgggttcatcatagctggctgaaaccagcagcagctgccatccaggaccagtggaccagtcaacaaaaccaagaccacccaacatggctgatcctgcagtgaaaccaagtcactgctgacacggacaacttccctgctctgactgcaccagaggctggtcggtccatgcacaactgaagcttgaggaaacactgagccctgctctagtcacacaaacagaatctgactagtctatgcatggccaaagcctaaggaagtcaatgatagataactaaatgcgggttaaatgtacaaacatagttatatgtttacttgtactgattattttgctgtcatgttatctttgcaaatgctgccaagcttgttgcctagaagggtgcctgtgcatagtataagcttaatcatattagtaatactaaagccaccgacactttcacctatggttataattggggaccaggatgtctgtcatcactgtatgatagaagcctggtccagaaaaggtgtgactaaaactctgttataccagacctactacaactgtacagggactcatacaggaacttgtgtctataactagactagttactcggtctgcaatcctggaaatgagcagccccaactatgttatgacccagagttcttgccctatgacttcgggtttaaagtccgaattggcgaacccctaatgccattatataccaaccccacagaaaccagggtcagtaaacttgtaaacaaaacagaagtattcccgtactcgcataaaaggcctgtctccatatattttgatgcctgccaagctgcacatctcagtaaactaaataatattaaaaccacctgtaaaaatctaggacaagaaaaactcagcagcagagccattattcgggtcgtggggtatgtctgttcttggtggctttgcaaaagtaccaactggtatcacaagatgggtatgtacccactcaagaagaaatagctaactgtggtgctctttactaatctacatttgtgtcgagcaccaaaagggaggaatgaagaaggaaataatgaaaataactataacctaatagtagtagtaatagaaattttaaaatcttcctaaagttgctgcaaagtgtgacaccccccttacactcaagttaaaaaggaatactaacagcctgtcttctctctgtggacagtgaaccttatctatactccacaactccacattcctcaaagtttattagaggcccagtgagttcctgcatggctgcagggtcacaataccaataagtttaggttgcaagacatgtttctctcaagatgtaagaaatgtcgtaatgctgcctttgtttcttgcttctgtaacttacttctcgcctcacgtagttcccaccttaagaagtttaaaagtaggaaaagccctttgttcagggctcagaattctggacatatgtccggctgagccggtgatcaccttaataaactttcctgaacctttttcagtctctccaatatttgattttcccacaacaggttaacaatgaaatcaagaaataaatttaaaaattctttgaaatgaataataatcatgacacaacttatcaaaacctctgggacacagcaaaagtgctgctaagaggaaagtacatagcattaaatgcctacatcaaaaagactaaaacagcatccgacggagtttcgacaaaagtgcaagagcaattatttaatgaaaaaatcgtcttcaacaaatactgctggagcaattggacatccatagtagaagaaaaaacaaccttgacctcaatctcataccttaaacaaaaaaatagctcaaaatgagttataattttaaatgtaaaaccataaaaacttttagaaaaaaaatcagagaaaatctttgagacctaaggcaccgagacgtgacctagatgtcacaaaattctagttagtatatggagaaactagatctcctacatatttctggtagaaatataaagtgacacagccactccaggaaatagctttgcatcttcttataaatgtaaacaaatgtcatacaacccggcaattgcgctttttggaaattacaccgagagacgaaaacttatgttcacaaacatacttgcacacaaatgatcatagcagctttacttgtaataagttcacaatggaaacaatctagatatccttcaatgggtgaatagttaaataaactgtagtcactaatactgtaaaatactactcaagaaataaaataagctcttgatgtacacaacttgaatgaatctccaggaaattatgctttgtaaaaatacaatcccaaaaagttacacattgtatgattccacttatttaacattcttgagttataaaattataaatatggagagcagattagtgaattccaggcgttagaaataggagagatagggatgacaatggaagtgactataaatgggtagcacaagaacaatctttgtggtgatagaaccattttgtgtcttgattatagtggttgttacatgagtgtagtcatgataaaattacatataactatgcacattcaagtatacacacacacacacgagtgcatgtacgacattaacatatggggtgaattgaacataaaacctctgtactagttttgcaacttcctacaaatctgcaactattatgaaataaaaaagtattttaaaaagtgaaataataaaagcagagagaatttgttctaacaaagctgcagtaaaataaagaataaagaaaaattttcaggcaaaagaaaaagaatgcaagtagacatagtaaggaatgaggataaaaagaaagaataaatacatatgctgataaatatatatgaatataaacaatattaacatactaaactatattagcaatgtattatagggtttaaaacggatgtgaaaataaaatacaaaaaaaataatccaaagagcaacagggatggtaaatagaggtaaagtgcaagttgctgtcattattaaagaagtggtaaaagaaatgctctattttagatcaaaataagtgaaggattcatgttgaaatcctcaaaaagagttattaaagataatccctcaaaaagcgtgaaaaaatacatattaatgtcatatagagaaaaataggataataaaaagtttaagtaaaaagaaagtaaaataaaaaagaaacataaagactgaaataaaaatatggcagataaaaacctagctatatcaataaattatattaaatgttaggtacaccaagtataagactaatattgtcaccaggtgcattggctcacgcctgtaatcccagcactgggaggccgaggcaggcagatctcaaggtcaagagattgagaccatcatggccaacatggtgaaaccacatttctactaaaatgacaaaaattagctgggcatggtggtgtgtgcctgtaggcccagctacttgggaggccgaggcaggagtatcacttgaacccagggcgtggaggttgcagtgagctgagattgtgccactgcactccagcctggtgacagagtgagactccgtctcaaaaaagaaaaattgactaatattgtcagactaattttttaaaattgtatgcttaaaaatgactatgaagacattgacaataatataatggaaatatatatgccatgcaaacacaaagtaaagatggactagctatgcaaatatcaatgtatatttcaagacaagatatattactacagagaaagagatattttataatgataaagtaataaatacatatacagaaaataaatgtatacatccaacaacttagattcaaaacataagtcatcactactaaaaagagaaattctaaaatttataatcatagtgggagcttttaacggtcctctcttaatatcagatagaacaaatacaaacaaattagtaagaatttacagatctaacaacacaattaatgaacttagtcaaatttacatatatagtacattgaacctagtaacagaatagtaaaattagtttgtgcacatttactaaaattgtccatgtgctgaatcataaaacaagtctcaacaaatgtcaaagaagctaaaaccatatactatgatctttccacagtggcattttattttttactaacaagagatagaaaactctcaacttcttgaaaactaattaacttctaaataacacaaggttcaaataagaaactataggaaaaattataaaagttttagttcaacattaataaatattagacataaaatctgttggatggagctcaaacaattttcagggaaaaattatggccctaaagtcacatattaaagaagaaaaaatattgaaatcagttatgtaaggttccatctcattaatctagttaaaagacagtaaaccaaacccaatgaagaataaaaatcagtaaactagaaaaatacatgtacatttgaaaaaaatcaagaattctatcagtactttgaaaatactgaaaaaatgataaatctccagaagacttatttttaaaaaagataactcaaaaataaccaatattaggaattgaaaatagtaaactactacaggccctaccattaaggctaataaatttgaaaaattagatgaataggaaaaatttcttcaaaaacacaacttaccaaaactgactcaagaaaaaacagaatatctgaacatttctacacctattaaggaaatataatatgtcatttaaaattgccccacatagaaaacccaggcctacattgctttactggtgaatttttccaaattttaagagggaacaccaaaatttcacaaatatttatagagtatagaaaaaaggaaacatcccccattcatttcataaagtcgacataactatgaagtgagaacttgacaggggaatcaaaagaatggaaacttacatactaaacttttgtgaacatagagattaaaatctcaacttattagcaaaatattagcaaacccagcatatattagcacatataataatgctaatacatcgcaaaatttgtatgtattctgggaatgcaagggtcatctaacatttaaagatcaactgatgtaacttaccacattaacacatttaaaaagggaaaaattacatgctcatctcaataggtgcatgagaaagtatatgataaaattcaacacccattcatgatttaaaatatatatatatttcctataagcgtatatatatatatatatacgcttataggaaaataagagcaaaataaactttcttaatcttacaaagaacgtctaccaaaaatcttccagcaaatatcacacttaaaggtgaaataatgaaaacattccccctacaatcagtaatgagacaagaaaaccactgttcttttccattttagtcagtactgtactggaggcctatagaggacaaactcaaaggtagtttccatgagtcccacctcatagtattcttgcccttgagtgtgcacgggacctgtgatttccttttagctaatagaatatgacaaaggtcatgggctgtcacttctgtgttcacatatgattacgacctccatcttgtaaggaaactcacacccttattggttttgaagcagcaagctgctctgttgtgagctggcttattgagagggctatatggcaaaaaactgaggatcacctctggccaaacagccggcaaaaagttgaggccctcaatccaacaacatgcaagggatatgaatgctaccaacaacaaaatgagcttgaataaagatcctttcccagtcaaacctcagaaaatcgcacagccctggccacaattttaatttgtgagaccctgcaacaaaaaagtcagctaataatatatattttttaattctcaaataagccaggcatggtggcacatgcctgtagttccagatattccagatacttgggaggctgaaaaagaaggatcccttgagcctaggggtttgaggccagcctgaataacatagtgaggctctatctctgaaaaaacatttttaaaactttttgtaaactcaactaagctatgactagtctcctaacccactgaactatgagataataaatgtgtgttaagtcactaagtttatggtaacattgttatatagcaatagatagttaatacaaggtcctaactagtgtaatatggtaacaacaacaaaagacatgtgtgtgtgtttatataatgtataaatatgtatgaatatatattataaaatatgtatatacaactaccatttacaaaagcattaaaaaatatcaaatatttctcaaagaacttaaagcagagcaaacatttgacccagcaatcccattactgggtatatacccaaaggaaaataaatcattctaccaaaatgtcatctgccctcatatgtttagtacagcagtattcataatagcaaggacatggaatcaacccaagtgcccatcaacagtggatcagataaagaaaatgtggtacatatacaccatagaatactatgcagccataaaaaaaaaaaatcacaacctttgcagccacaagaatgcagctggaggcaataatcctaaaagaattaatgtaggaacagaaaacaatactatatgttctcacttaaaagtgggagctaaacattgagcacacatagacataaacatttgaagaatggacactatgaacttctagaagacggaggaaggcaaactacatactagacggaaaaactacctatttggtactatgctcaccacctgggcgacaggatccataccccaaacctcagcatcacataatatgtccatgtaataaacattaaacatgcccatgcatcctctctgtctaaaataagagttgacattttttaaaaaatcaaatatttaagacaaaacctaaaaaaatgtggaacatctctacaaaaaaatctataaatgttacctggagaaagcaaagactctaagcaaataaaggaatataacatatgtccacagactgaatgaatcaccactgtcactgtcaatgacagagagtcaatattgccatctcccacagtcatgtcagttctcccgaaaatgatctatagattcaaggtagttctaatcaaaatctcacaagggtgtttgtggaatttttcaagccatttgttaaacagaaatgcaagagcggctggcaagatggccaaataggaacagctccggtctgcagctcctagcaagatcaacacagaaggtgagtcatttctgcattttgaactgaggtactcagctcatctcactgggactggttagatagttggtgcagaccatcgaggaggagcagaagcagggtggggcgttgcctcacccaggaagtgcaaggggttgaggaactccctaccttagccaagggaagctgtgagggactgtgcattccggctcagatactacactttccacagtcttcacaacctgcagaccaggagattccctccggagcctacaccaccagggccctaggtttcaagtgcaaaatatggcagccatttgagcagacaccgagctagctggaggagttacttttcatacctcagtggcgcttggaatgccagtgagacaagcattcactcccctggaaagtgggctgaagccagggatccaagtggtctagctcagtggaccccaaccccaccgagcacagcaagctaagatctactggcttgaaactcttgctgtcaacacagcagtctgaggtcgatctgaaacatgctatcttggtggggggaggggcgtcctccattactcagcttgagtaggcggttttctgctgacagtgtaaacaaagccgccaggaagttccacctggatggagcccaccacagctccacaaaggtgctatagccagacctcctctctaaattcctccttgctgggcaaggcatctctgaaagaaaggcagcagccccagtctggggcttatacataaaactctcatctccctgggacagagcacctggaggaaggagcgggtgttggcgcagcttcagcagacttaaacattcctggctgctagttctgaatagagatctcccagcacagtgctcaagctctgctaagggacagactgcctcctcaagtgggtacctaacccccataactcctgactgggagacacctcccagcaggggttgacagatacctcatacaggagagctccagctgacatatggcgggtgcccctttgggatgaagcttacagaaaaagaaacaggcagcaatctttgctgttctgcagcatccactggtgatacccaagcaaacagtctgcagtagacctccagcaaactccagcagatggcctgactgttagaaagaaaactaaccaacagaaaagaatagtatcaacatcaacaaaaaggatatccacaccaaaaccccatccgaaggttaccaacatcaaagaccaaaggtagataaatccacaaagatggggagaagccagcgcaaaaaggttgaaaattccaagaaccagaatgactcttctgctccagaggatcacaactcctcaccagcaagggaacaaaactggatggagaatgagtttgatgaattgacagaagtaggcttcagaagatgggtaataacaaactcctccaagctaaaggagcatgttttaacccaatgcaaggaagctaagaacctagaaaaaaggtcagatgcattgctaactagaataactaatttagagaagaacataaatgacctgatggagctgaaaaacactgaatgagaactttgtgaagcatatacaagtatcaatagacaaatcaatcaggcggaagaaagaatgtcaagaatgaagagcaacttaatgaaatacagcacgaagacaagattagaaaaaaagaatgaaaaggaatgaacaaaacctccaagaaatatgggactatgtgaaaagacctaacctatgtttaactggtgtacctgaaagtgatggggagaacagaagaaagttggaaaacactcttcagtatattatccaggagaacttccccaacctagcaagacaggcccaggccaacattcaaattcaggaaatacacagaataccacaaagatactccttgagaaaagcaatcccaagacacataatcatcagattcaccaaggttgaaatgaaggaaaaaatgtttaacatttttccttcagccactgagaaaggtcaggttagccacaaagggaagcccatcagactaacagcagatctctctgcagaaaccctaccagccagaagaaagtggggggaaaatattcaacatttttaaagagaagaattttcaacccataatttcatatccagccaaactaagcttcataagcaaagggaaataaaatcctttacagacaagcaaatgctgagagattttgtcaccaccaggcctgccttacaaaagcttcctggcggctttgcctttcaagagctcctgaaggaagcactaaacatgaacaggaacaactggtaccagcacctgcaaaaacataccaaattgtaaagaccatcgactctacgaagaaactacatcaactaacaggaaaaataaccagctagcttcataatgacaggatcaaattcacacataacaatattaaccttaattgtaaacaggctaaatgccccaattaaaagacacagactggcaaactggatagtcaagacacatcagagtgttgtattcaggagacccatctcatgtgcaaagacacacataggctcaaaataaagggatggaggaacatttaccaagcaaatggaaagcaaaataaagcaggggttgcaatccctgtctctgataaaacagactttaaaccaacaaagatcaacagagacaaagaagggcattacataatagtaaagggatcaatgcaacaagaagagctaactatcctaaatatatctgcaccacatacaggagcacccggattcactaggcaagttcttagagacctacaaagagaattagactcccacacaataatagtgagagactttaacaccccactgtcaatattagatcaacaagacaaaaaattaacaaggatgttcaggacttgatatcagctctcaaccaagtggacctaatagacatctacagaactctccaccccaaatcaagagaatatgctttcacctcagcaccacatcatacttattctaaaactggccacataactggaagtaaaacactcctcagcaaatgcaaaagaacagaaatcataacgaacagtctctcagaccacagtgcaatcaaattagaactcggggttaagaaactcactcaaaaccacacaactgcatggaaactgaacaacatgctcctgagtgactactgggtaaataacaaaattaaggcagaaataaagatgttttttgaaaccaatgagaacaaagacttaacgtaccagaatctctgggacacagctaaagcagtgtttagatggaaatttatagcattaaatgcccacaggagaatgtgggaaagatctaaaatcaataccctaacatcacaattaaaagaactaaaaaagcaagagcaaacatattcaaaaggtagcagaagacaagaaataactaagatcagagcagaactgaaggagatagagacaggaaaacccttcaaaaaaaatcaataaatccaggagctggttttttgaaaagatcaacaaaatagatagaccgctagccagactaataaagaagaagagaaaagaatcaaatagatgcagtaaaaaatgataaagtggatatcaccattgatcccacagaaatacaaactaccatcagagaatactataaacacctctatggaaataaactagaaaatctggaagaaatggataaattcctgaacacatataacctcccaagtctaaactaggaagaagtcgaatccctgaatagaccaataacaaattctgaaattgaggcagtaattaatagcctaacaaccaaaaacagtccagaacaagacagattcacagctgaattctaccagaggtacaaagaggagctggtatcattccttctgaaactattccaaacaatagaaaaagagggactcctccctaactcattttatgaggccagcttcatcctgacaccaaaatctggcagagacacaacaaacaaggaaaatttcaggccaatatccctgatgaatatcgatgtgaaaatcttcaataaaatactgacaaaccaagtccagcagcacatcaaaaagcttatccaccacaatcaagtcagcttcatccctgggaagcaaggccggttcaacatatgcaaatcaataaacataatccatcacataaacagaaaaaatgacagaaaccacatgattacctccaaagatgcagaaaaggcctttgacaaaattcaacaccatttcatgctaaaaacactcagtaaactaggtactgatggaacgtatctcaaaataataagagctatttatgacaaacccacagccaatatcatactgaatgggcaaaaactggaagcattccctttcaaaactagcataagacaaggatgccctctctcaccactcctattcaacatagtattggaagttctagccagggcaatcaggcaagcaaaagaaatatagggtattcaaataggaagagaggaaatcaaattgtctttgtttgcagatgacatgattatatatttagaaaaccccatagtctcagccccaaatctccttaagctgataagcaacttaagcaaagtctcagaatacaaaatcaatgtgcaaaaattacaagcattcctagacaccaataatagacaaacagccaaatcatgagtgaattcccattcaccattgctactaacagaataaaatacgtaggaatacagcttacaagggatgtgaaggacctcttcgaggagagctacaaaccactgctcaaggaaataagagaggacacaaacaaacggaaaaacattccatgctcatggataggaagaatcagtatggtgaaaatggccatactgaccaaagtaatttgtagattcaatgctatccccatcaagctaccactgacattcttcacagaattagaaaaaaaactactttaaatttcatatagaaccaaacaagaacccacatagccacgacaatcctaagcaaaaagaacaaagctggaggcaccatgctacctgacttcaagctatactacaaggctacagtaatgaaaacaccatggtactggtaacaaaacagatatacagacctatggaacacaacagaggcctcagaaataacaccacacatctacaaccatctgatctttgacaaacctgactaaaacaagcaataaggaaaggattctctatttaataaatggtgttgggaaaactggctagccacatcctgaaaactgaaactggaccccttccttacaccttatacaaagattaactcaagatggattgaagacttaaacgtaagacctaaaatcataaaaactctagaagaaaatctaggcaatactgttcaggacataggcatgggcaaagacttcatgactaaaacaccaaaagcaatggaaacaaaaggcaaaattgacaaatgggatctaattaaactaaagagattctgcacagcaaaagaaactatcatcagagtgaacaggcaacccacagaatgggagaacattttttgcaatctatccatttgacaaaggctaatatccagaatctacaaagaacttaaacaaatttacaagaaaaaaacaaccccatcaaaaagtgggcaaaggatatgaacagacactcctcaaaagaagacatttatgtagccaacaaacatatgaaaaacagctcatcatcactggtcattagagaaatgcaaatcaaaaccacaatgagataccatctcacgccagttagaatggctatgattaaaaagtcaggaaacaacagatgctggagaggatttggagaaataggaacacttttacactgttggtgggagtgtaaattagttcagccattgtggaagagactgtggcgattcttcaaggatctagaatcagaaataccatttgacccagccatcccattactgggtatataaccaaaggattagaaattattctactataaagacacatgcacatgcatgctttttgcagcactgttcacagtagcaaagacttgcaaccaacccaaatgcccatcagtgatagactggataaagtaaatgtggcacatgtacaccatggactcctatgcagccatagaaaaggattagttcatgtcttttgcagggacatggatgaagctggaaaccacgattctcagcaaactaacacaagaacagaaaaccaaacaccgcatattctcactcataagtgggaggcgaacaatgagaacacatggacacagggaggggaatatcacacactggtcctgttgggtgatgggggtgtaggggagggatagcattacaagaaatacctaatgtagatgacggattgatgagtgcagcaaaccaccatggcacttgtatacctatgtaacaaacctgcactttctgcacatgtatcccaaaactttaagtataataaaaaatttttaaaaaacaacaacaacaaaaaacataaataaaagagcaaggtgttatgctacttgggagacagaaaacaatatgatgagtcaggctatagtatgtatttggaagatagagtgagagacagagaatgagagatagaaaaaagagatataaaaagaatttaaaaatttttattattataccaaattattgatatattttctaaagaaatgttataaaaaatagaaatgcaaaagttaagtttaagaaagagaactaaaatagaatggttaatcaaattgcagaatatccattaaatagaatagtacataataatgaaaataaataaactacagctaaatgccacatggatggaactcataaatacagtgctgagcaaaggaatccaaaagcaaagaactatatatatattattccatttttatatgtgtcaaaaacaggcaaaattaatctatagagttggaaattaggatacctgggggtaagtgactggaaggtaacataggggagtttctatgaatctagtaattttctgtatcttgatttaggtgtttgttacacaacggcaaagttatttcaaggtgtacacttaagatttaaacagtttcctgatgattcagtaaaatttacaaacaaacaaagaaatagggaaagtctatataaagagtgatcctttagaatatactatagagggaaaaaagcaagacacaaaactgtataacatgctacattaacatgtagcattaattttgcctgttttttgacgcatacaaaaatggaataatatatatgaagttttctttcggcttcttttgctcagcactgtatttatgagtttcatccatgttgcatttaactgtagtttatttattttcattgttatgtagcatgttatgcagttttctgtcttgctttcttccttctttataatatattctaaagatcttgctaatttgtttaacaatatattgtgtgtaataaaatatatataaatatatatgtatattttgtctcgcttttttccctctttataatatattataaagaccttgctaatttgtttaaaggtcttgctaatttgtttaacaaaaaaatatgatattctctctatatatgatatatgtaaaaatatatggttttctatttggcttatgtacatataagaaagaaaattatgttacatattatatttgcttatatatgtatgtaatgaacgtctataaagaaaaaacaaattaattacactgtttagctctgctgaggggaagtaagtaagtgtccaggggacaggaatagaagaaagatcctttattgcatacactgttgtaccttttgaatgtcaaacccagtaaatatattagttatgcaacactttgaaaagaatcaaagccagttcaaattgcctttataaaatattttaaatgtgggttataaattgggtctgcaaaagccaattcagatggatccagtttgccagagatttcataaattatggagttttcaacaaaatattgcttccttccagtttagttaatagttttcagaaattctctgatagtaagtagcagaacactagagtaagaaaaattaaatatacataataagtacagataatttaagggtctgtatatcgtagcctacatttgaatttcactcaaaagccatataaaacaactctatgctttctccagtattacataaatttatgattgtgatagcaaggactgctatgcctaaaatatgaatgttttattttattcattactcagatcatgcattacaaaaatcaagacattttttcttccctatttaggtttaaaatcgtatttgtaagaagtccaaggatcatccaccagaaaggctttaatatataagccttaccagatgcaaaggttcatacttgtaatcctaatactttgtaaggccaaggcaggaggatagcttgagcccagtagttcaagtctagcctaggcaacacagtgagaccccaggccaagcacagtggctcatgcctctaatcccagcactttgggaggctaaggtgggaggattgcttgagcccaggaatttgaaatcagcctgggcaacatggagagaatctgtttctacaaaaaaaaaaaaaaaattaacattagtcaggcatcatagtgcacacctcaggaggctaaggtgggaggactgctgtagcccaggaattcaaggttgtgtgagccaagctgatgctactgtactccagcttaggtgacagagtgagaccctgtctcaaaaaaagcatagtaagaaaccatctctactttaaaaaaaaaatagctgggtatggtagcacatgcccatagtcccagcactaaggaggctgaggcgggaggattgcttgagcccaggagtttgaggctgcagtgagctaggatcacaccattgcactccagcctgggagacagagcaggaccctgtctccaataataatactccaataatagtaataataataatgaaagcctattacttaacaatctaaggctggattctgccttcaaaaattgtaagactaaagactgtaggtgccctaataaaataagctaaaatttatagtataaatttataaactgaaacacatttagcataaacataagagtacttagaaaatttacagaattaaacggctaatatcagatgttttggagaatgtcccaaaagatgcttggttaaattctcctataggacctgaacctcccattcaccatacttcgatagataattttatctcctccaataagttatgatcataatgaatattctcatgttacatgacaatatgtatgtatctttcttaagagataaatatcacatttatctttaatgtaagcattaaaacattttcaaacttcctgtgattaaaacttatctcaaatctgtcagcttgctcttttatgtttctaccaattaatctaactcagttgagataataaaatcactattggaaatcatcaccactaatcaattcttcctcccaaaaagtccataaaaggggccagaacattgccttcaacattccaattgtgaggggaaataaaaacactctgtccatccacataaaagtatacagtcagatctattcaaagtattagaagaaaaatcttacaaacagagagaaagataaaatcaatatggtgatctaaataggttaatattttactggtaaagaaaaagaaacagtaaaacaactctttttaaaattttattattattatactttaagttttacggtacatgtgcacaatgtgcaggtttgttacatatgtatacatatgccatgttggtgtgctgcacccattaactcgtcatttaccattaggtatatctcctaatgctatccctcccccctccccccaccccacaacaggccctggagtgtgatgttccccttcctgtgtccatgtgttctcattgttcaattcccacctgtgaatgagaacatgcggtgtttgctttcttgtccttgtgatagtttgctgagatgatggtttccagtttaatccatgtccctacaaaggacatgaactcatcctttttatggctgcatagtattccatggtgtatatgtgccacattttcttcatccagtctatcgttgttggacatttgggttggttccaagtctttgctattgtgaatagtgccacaataaacattcgtgcacatgtgtctttatagcagcatgatttataatcctttgggtatatacccagtaatgggatggctgggtcaaatggtatttctagttctagatccctgaggaatcgccacactgacttccacaatggttgaactagattacagtcccaccaaccgtgtaaaagtgttcctatttctccacatcctctccagcacctgttgtttcctgactttttaatgattgccattctaacgggtgtgagatggtatctcattgtggttttgatttgcatttctctgatggccagtgatgatgagcattttttcatgtgtcttttggctgcataaatgtcttcttttgagaagtgtctgttcatatcctttgcccactttttgatggggttgtttgtttttttttcttgtaaatttgtttgagttcattgtagattctggatattagccctttgtcagatgagtaggttgcgaaaattttctcccattttgtaggttgcctgttcactctgatggtagtttcttttgctgtgcagaagctctttagtttaattagatgccatttgtcaattttggcttttgttgtcattgcttttggtgctttagacatgaagtccttgcccatgcctatgtcctgaatggtattgcctaggttttcttctagggtttttatggttttaggtctaacatttaagtctttaatccatcttgaattaatttttgtataaggtgtaagggatccaaattcagctttctacacatgtctagccagttttcccagcaccatttattaaatagggaatcctttccccatttcttgtttttgtcaggtttggcaaagatcagatggttgtagatatgcagaattatttctgagggctctgttctgttccattgatctatatctctgttttggtaccagtaccatgctgttttggttactgtagccttgtagtatagtttgaaatcagggagtgtgatgcctccgactttgttcttttggcttaggattgacttggcaatgggggatttttttggctccatatgaactttaaagtagttttttccaattctgtgaagaaagccattggtagtttgatggggatggcattgaatctataaattatcttgggcaatatggccattttcacgatattgattcttcctacccatgagcatggaatgttcttccatttgtttgtatcctctatttccttgagcagtggtttgtagttctccttgaagaggtccttcacgtccctgtaaggtggattccaaggtattttattctctttgaagcaattgtgaatgggagttcactcatgatttggctctctgtttgtctgttatttgtgtataagaatgcttgtgatttttgtacattgattttgcatcctgagactttgctgaagttgcttatcagcttaaggagattttgggctgagacaatggggttttctagatacacaatcatgtcatctgcaaacagggacaatttgactttctcttttcctaattgaataccctttatttccttctcctgcctgattgccctggccagaacttccaacactatgttgaataggagtggtgagagagggcatccctgtcttgtgccagttttcaaagggaatgcttccagtttttgcccattcaatatgatattgactgtgggtttgtcatagatagctcttattattttgagatatgtcccatcaatacctaatttgttgagagtttttagcatgaagggttgttgaattttgtcaaaggccttttatgcatctattgagataatcatgtggtttttgcctttggttctgtttatatgctggattacatttattgatttgcgtatattgaaccagccttccatcccagggatgaagcccacttgatcatggtggataagctttttgatgtgctgctggattctgtttgccagtattttattgaggatttttgcatcgatgttcatcagggatattggtcttaaattctcttttttggttatgtctctgccaggctttggtatcaaagcctggatgccaggatgatgcgggcctcataaaatgagttagggaggattccctctttttctattgattggaatagtttcagaaggaatggtaccagctcctccttgtacctcgggtagaattcggttgtgaatccatctggtcctggactgtttttggttggtaagctattgattattgccacaatttcagaacctcttattggtctattcagatattcaacgtctccctggtttagtcttgggagggtgtatgtgtccaggaatttatccatttcttctagattttctagtttatttccatagaggtgtttgtaatattctctgatggtatttctgtgggatcggtggtgatatcccctttatcattttttattgcatctatttgattcttctctcttttcttctttactagtcttgctagcggtctatcaattttgttgatctttttgaaaaaccagctcctggcttcattaattttttgaagggtttttttgtgtctctatttccttcagttctgctctgattttagttatttcttgccttctgctagcttttgaatgtgtttcctcttgcttctctagttctattaattttgatgttagggtgtgaattttggatctttcctgctttctcttgtgggcatttagtgctataaatttccctctacacactgctttgaatgtgtcccagagattctggtatgttgtgtctttgttttcgttggtttcaaagaacatctttatttctgtcttcttttcgtcacgtacccagtagtcattcaggagcaggttgttcagtttccatgtagttgagcggttttgagtgagtttcttaatcctgacttctagtttgattgcactgttgtctgagagacagtttgttataatttctgttcttttacatttgctgaggagagctttacttccaactatgtggtcaattttggaataggtgtggtgtggtgctgaaaaaaaatgtatattctgttgatttggggtggagagttctgtagatgtctattaggtctgcttggtgcagagctgagtacaattcctgggtatccttgttaactttctgtctcgttgatctgtctaatgttgacagtggggtgttaaagtctcccattattattgtgtgggagtctaagtctctttgtaggtcactcaggacttcctttatgaatctgggtgctcctgtattgggtgcatatatatttaggatagttagctcttcttgttgaattgatccctttaccattatgtaatggccttctttttctcttttgatctttgttggtttaaagtctgttttatcagagactaggattgcaacccctgcttttttttgttttccatttgcttggtagatcttcctccatccctttattttgagcctatgtgtgtctctgcacatgagatgggtttcctgaatacagcacactgataggtcttgactctttatccaatttgccagtctgtgtcttttaattggagcatttagtccatttatattgaaagttaatattgttatgtgtgtatttggtcctgtcattatgatgttagctggttattttgctcgttagttgatgcagtttcttcctagccttgatggtctttacattttggcatatttttgcagtggctggtaccggttgttcctttccatgtttagtgcttccttcaggagctcttttagggcaggcctggtggtgacaaaatctctcagcatttgcttgtctgtaaagtattttatttctccttcaattatgaagcttagtttggctggatatgaaattctgggttgaaaattcttttctttaagaatgttgaatattggcccccactctcttctgaacaactctttactgatcttaaagttttttgatatccttgaaatttctgctacattacttattttaaactaaaataaccagaattaggactaaagaaataagtcctatctagtttcaacaaatttctaaaatataaattcctttcctcttaaaaaaaaagactaagtttagagatttggcgtgagatagctgagtagaagtgggtaataagcaccactctcatggagagaagaaacagtggtgaatggacactagctcttcaaccagaacatccaggtggaaacatggggatttatcagggaaacagcatcacccacagtgaacagagaagagcaagacaggacaattgcccacccagaagtggcatggagccagaggagtcctcacatcacagggaacagtgagtgagtgagagtccccagggattcacacttctgtcatggacctttgcatccttggactcaggatcaggagatttctcatgatccctgcaaccagggcttccagacaaacatgcaaagagttatgtggagtcttggcagagccatcactcaggtactcacagactcccaggagtgctggatccccaggcacctcaacaccagcagatgcagctctagcaatggaggaggccaggctccctcacgtctccaggaaaggggctgaatccatgtggctgaagagtaactaggcccagtagaccttatcctgcaaggtgctacaggcctcgtctctgcagcaccttgcaggataagacccatgggcctgggacactagtgagaccaccacagccctaccagaattctcggatcaggagcagctctgtgcttttctgggacaagcttctagagggagaggcagaccacatccacaaccctccctcctgtttgccctcaggctggggagtgtactcagtgattaggggcaatcgtagacactcagtaaaaggcagccaccttaaggaaaagtagccagattgttttacacaggagcccccacccctgctacttctcactgagcaaggcctcctgacctagaacctcaaccaccccacactggactcttaggccactaccagctctccacttccctgggacagagctctcagtgggaaaggcaggccaccatgtttgttgccctacaaccttccccactgatgccctcaagatcaggagggtacacagtgattagggactaccatgaacccctagcacagtgcagccaccttacagaaaagcagcagactgttttctacatgggtccccaaccctgctatggttctctgggcagtgtctccctaccggggtctctagccaccccctacctaggctctcaggctagtagcagctctgtgcttttctgggacagagctcacagaaggagcaagcaggccaccatttttgctgccctgcagcccttgctcctgttgcccttgggattgagaggacatatagtggttggggaccgatacaaacctctagcacaacacagccactttatggaaaagcagccagacttgtccacatgcctccactactcttcactgggcagtgcctcttgacctgggctcccagcacctgtagtcccagctactcaggaggctgaggcaggataatcgctcaaaccagggaggcggaggttgcagtgagccaagattgtgccactgcactccagcctgggcaatagagcaagactctgtcttaaaaaaaaaaaaaaagactctaactgatctgatagagtggaaaacacactacaagaatttcataatgtaattgcaagtattaacagaagaatagaccaagttcaggaaagaatctgagagctcaatgactggttctctgaactaactcagtcagagaaagaaaatgaacaaaacactcaaaaaataaaggattatgtaaagagaccaaatctccaattcattagtatccctgcaagagataaggagagagcaagcaacttggaaaatatatttcagaatatcacccatgaaaacgtccccagcctcactagagaggccaaaatacaaattcaggaaatgcagagaaccagcgtgagatactacacaaaaagaccatggccaagacacataattagattctccaaggctgaaagaaaagggaaaaagtgaaaggcaactggagagaaggggcatgtcacctacaaaggaaaccccatcaggctaacagaggacctttcaatagaaaccttacaagccagaagaaattgggggtctatattcagccttactaaataaaacaatttccaagcaagaatttcatatccagccaaactaagcttcataaacctaggagaaattagattctttcccgataagcaaatgctaagggaatttatgaccaccagacctgccttacaagaggtcctgaaaggagtgctaaatatggaaagcaaagactgttataagctactacaaaaagacacttaagtatacaaactgttgaccctataaagcaaccacacaaacaagtatgcacaatagccagctagaaacatgatgaaaggatcaaatccacacacataaatattaaacttgaatgtaaattggctaaatgctccaattaaaaggcacagagtggcaagctgtataaagaagcaggactgaatggtatgctgtcttcaagagacccatctcacatgtaatgacacccataggctcaaagtaaagggatagaggaaaatctaccaagcaaatggcagtcagaaaaaagcaggggttgttatttcagacaaaacatactttaagctaacaaagatcaaaaaagacaaggaaggacattacgtaatggtaaagggttcaattcaacaagaatgcctaactatcctaaatatatatgcacccaacacaggagtacccggattcataaagcgagttcttagagacctacaaagagacttagattcccacacaataatagtgggagacttcaacaccctactgacagtttttagatagaccatccagtcagaaaattaacaaagattttcaggatctaaacttaacacttcaccaaatggaactattagacatctacaaaatgccctacccaaaaggaacagaatataccatcttcttatctgtacatagcacatactctaaaatcaaccacacaattggacataaaacaatcctcagaaaatctaaaaaaaatgaaaccataccaaccacactctcaggccataatgcaataaaaataaaaatcaatactaagaaaatcgctcaaaaccatacaattggatggaaattaaacaacctggtcctgaatgacttttgggtaaacaatgaaattatggcagacatcaagaaattctctggaactactgagaaccaagaaaacataccagaatctctaggacacagctaaagtagtgctaagaggaaagtttatagtgctaaaggtccacatcaaaaattcataaaatctcaaattagcaacctaacattacacctagaggaactagagaaacaatacaaaacaaacccaaagctagcaaaagacaagaaataactaaaatcagagctgaaatgaaggaaactaagaggcaaaaaaaccatacaaaagatcaatgagtacaagagttggttttttgacataagaaatatgatagaccactagctaggctaataaagagaaaaagagagaagatccaaataaacaatcataaatgccaaaaaagacattaccaccaaccccacagaaatataaaaaaccctcagagactgctatgaacacctctatgcacatagactagaaaacctaaaataaatgaatacattcctggaaacatacaaactcccaagattgagccagggagaaattgaatccctggacagaccaataaagagttccaaaattaaatcagtaataaaaagcctaccaaccataaaggacccaggacaagaatgattcacagccaaattccaccagatgcataaagaatagcttgtaccattctaactgaaactactccaaaaaattgaggaggaggaactcctctccaactgattctatgaggccagcttcatcctgataccaaaacctggcagaaatacaacaaaaaaatcttcaggccaatatccttgatgaacacagatgtaaaaattctcaacaaaatactagcaaactgaatcctgcagcacgtgaaaaagctaatcaaccacactcaagcaggctttatcccaggatgcaaggttggttcaataatcacaaatacataaatgcgatctactacataaacagaactgaaaacaaaaaccacatgactatctcaatagatgcagaaaagtcttctggtacaattcgatgtccttcatgttaaaacccctcaacaaactagacattaaaggaacatatttcaaaataagaagagccatctatgacaaactcacagccaacatcatactgaatgggcaaaacctggaagcattccccttgaaaaccaaaacaagacaaggatgccatctctcaccattcctagtcaacatagactggaagtcctaggcagagcaatcatgcaagagaaagaaataaaaggcctgtaaatattaataggaagaaaggaagtcaaattatctctctttgaagataatatgagtctacacatagaaaaccccataatctcagcccaaaagctccttaagctaataaacactgcattagtaggtgactggatctatatcaattacgcattttctacaaaaaagaaaacactatgaaagtaagcataaacattaaattatttctagctgttgagattatgaggaaaaaagcctgtcaagttaacaaaaacttgctcaggaaataattttgttgtacattaagaaattgtttaattcataggttcttaccgttcccggttaaatttaagagaatggagtatggctggccttttttgtctaaggttccacaaatgaagtgtatcatctgaacttgcactgaccaaggcaccctagaacaaaaagaagataaagtaagtgtgtgatttacttaatttagggtttttttaatcacaaacaagctaatttactcaatgtttactacctgaagagttacttttgttatctcagaaatataaggaaggataggtgcataaacttcaatcaggaagggtaagaatgctgaaagtagaagaggcaactgacccactgcatttcaacggtcagggagactagcttaaggaatatttatttaccaatagagaggattaattattatagcactgttatggccattaaaggtttttctttgggaaaaaatagtttagggatggtttttgtttctactgtttacacatatactatatagccttacagagaagaaaatattcaatgcagtcttacaaaattgaatacaggtcatataaaaattctcctttgcaagaattttctgtatatttggaaagcgtatattcttcctaaaaagtatatttggtataatttaatttgcttcttatagtccaagaagcttcatcaattataaaggaaatatccataataaaagaaaacatttctccaactagaatttagtataactataaaattatactaagattccttttatacagcaccaccaaatacaaatgaatcctatttcgcatacaataggatattttctacctcttaatgtggcagaaagcatgtggacagataataactgtttgtatgactttgtatatatgcttaaactatttatttgactgggttaaatcagatcattttaaaatgttagaacttttaccataatgacagctaaccagctgaaaatgtcgatgcttacccattcacagatcctaaatccagagcattaaatgtgttctctaagagtgatctttcagaaccttggttgtccagagatacctaaaaggctttttatattttccaaagtactttgttagaagtaatctctcatagtttacagtatcaatcacagatatcccatttagatgctaggaagaacgatattgaaattgctagcatttatttcttctttaggaattagaagagagaagataggaatctaaatgcccttctataataatttctaagccaaaaaaatgctcatgtatcctatgataggtctctttatatttggtacctgtgattttagtctcagagaggaatggctttataaaaatagaaacataatcaaagatcatatccaagaaaatatttagaaatttgtatgatttgcacatttatatctaattacatacatacatgttcaaagatgtatatattgatatatacatcttaacatgaactcagataatttccttcaatgaaataggaggtattctatatataagccttgataatttttgtgtttgtttgcctgttttatttgtatactgtacttatgcttcctataaacaaacgagaaatttattaggattccttggaagcatttgatgagttacacttgatttttttgaatacagtatactggtctcatttctcagagaggtggaagttcacctgagatggggtgaggatagaacatgatatgtaacaacaataaaacattctctacaagagatagttacatgctatacagaagataaaacatgccaaaggcaatgttattaaagtagcatatattcaataatatcttacagtaatacctaaataattctagtgaggaactcagtattctttttttgtttgtttgtttgtttttgagatggagtctcgctctgttgccaggctggagtgcagtggtgcgatcttagctcactgcaacctctgcctcccaagttcaagcaattcttctgcctcagcctcctgagtagctgggactacaggtgtgtgcaaccacgtccaactaatttttgtaattttagtagagacggggtttcaccatgttggccaggatggtcttgatctcttgacctcgtgatccacccaccttaacttcccaaagtgctaggattacaggcgtgagccaccgcgcccggccagtattcttaattctgtgataaaactgagatgtgacttatcatcggagagaagtgaacggtaccactaagcataacagcaccaacagagacagacacatgaaagtaagcagaacaccacagtgtctaggttcatttataaaaacaaagtgaacctaccaaaagcactataaagatctgtgaaaatgcttaaaactaagaatagaaaaaccagtcaggtcagaaactgggaagtttgggaaaagatacagcagctttgtgtgaggtacatagggcgagtagttcaggataaatgaggtgaacaaggcaaggaggttgaaggcttgtctttatttattcttagttatgtaccacaggggcaaacttaggacctggaagacaagtctcaaaggatcagacccagtacaaatcacatggaaacaaattatgcctgtaagtatacatccatgcagaaggcaaaaagctgagatccctcaacaaggaactacagagtatcactgagacctcgagaagcctgacattctagataataatgagcagttattacaatgaaatatttttcaaatgttttctttaccttcctttctcatttcagtaccccatagcaagtgtgcctacatggtgaaatatgctacgtttgtcaataaagaggatctcatagtcctctgagaaagactttgagccaagagaagtgaaaagtgaacatttgccaatatctttcttgccttgggttacctctgatatgaagttctatgagacattttacccacacttataattgtaagttcttaggaagataaacagatatagatatatgcaaatatatgcagacactgaatgaaagatcattgtcatgccatgagaaaataaccaaacatttttttccgagacactgagttcaatcttctaagtgcctgcatttggcatggcacaaacttttaaagcatttttgcattgactggctcacttaatataaaagaagctctagaagactctaatttccactataaaaatctgatttaagaaagcctaaagtagccttctactaatggaatatctgcaacctctctgagcttcataaatacatattttgtttttagagagttcctcatcaccataattttataaaaatgtagatacagtagaaagctaatttccataataactacggacacaaaaataactacaaatgcatatctattccaacaaatgtatttggagatatatgcagataaaagggcccatacgtatataagcaaaaggatcatttcagggaagataaagataaaatatgaagttaggccttaattacaaaatttaagttggtgggaagtgagtgtatagaaaaaaaattaatggccagtgaagcaatcaaaagacattaggattttttcttaatttaaataattaaactaaattatgctatatagtaacaataacagaatatggcatatacaatcttttttctttaaaatttaataaattaaccaatacaggagtacagtcttttgtgaaaaatataatcagaagtaatattgcatgcatatatatttaagcatttagaatcacagtatttaaaagattacattaactgattcactgtgtagtgggggagtgtgtgatttaagtagtcaaaaaataatccttacctcattgatcaaaaattggagctgtaggacagctgcaccactttcatgttggcaatagcaatcaacaccaggtctcccgagtctaatataataaaagtcaaggattctaacattttaattagcaccaatattaatgagcaaagaaactaacttattgatcaacagatgttttgctatttggtttcccttatttttataaatagttgaaaaatcttactcttagtagatgtaaattaaattgtatacctcagatgtttaatactccaacaatttgaaaaaaagaatgacaataaggaatttgaaagatggcagctttttccatgaagttaaacaagaattgggaatctagatacacctcatttcatttaagattttttaattgattaaacactattttcaccacaataaattcaaagtgagtcaataacttcatataattaaatcataagatgagacttaaaagacacaggtaaatatgttgataatcttgacatataaaaaatcttctaagcataatttaaaactcagagatcataaagaaatagactgatatatctgactaaataaaagtataaaacatctacacagaaaaacatgataaggtaaaaaaacgagaaaactggaaaataaatggtaacaagtcatctacatatgctacataacatataagtaagagagagagaaaaaaaaggaaggaggaggaatgaaggtaaaaaaaaaagaatgagaaaacaccatataacaaaatttacttacatattctataccaaatgatctgatatatatgtatatttacttatcatttgtttgcttgcataaagatacaaattagatgagagtctccacttacggtcataatgaggaatgtgggccagatttattcaccacataaaacaattaaaaatctgtacaaaatgtatgtaacaaattttaagacactgcatatcaggtaggaaatgacaatgatccctgaaagagagaaaatatataaggcgaggcttatgatagccccagtttactgcctagagagaatttcaaggctccaacacaaggaaggggaacccagataaaatctagcaggcctactgaatggggagacagaattaacagtctagggaggccagggacaactagagttcatagggttgagtagcaaagaagaaaatgtgacacacaaaaagagctctagagatttgcagaagggtcttcctcaaatctttagctaagtactaaggaaggaataagtttgaagaaactatctgagactgaggaaagaacaaaccaagaagaaaaagcatccttcttgaagaataaatcaagaaaacaaaccaaaaataaagtttatgttgaggcaagaatttttcatgttcccaccaacaaaagtgcaaaccctcagaattcacatacaaagtactcagagaatattacctcagtatgaggaaaaattcctccctaagataaagactgctctggttctgcttagcagtacttaaaaccaggttacaaaaggatcaaactgttccacatagcttaactgcatactaaacaaagatcaaggataattatagaaatacgaaaacctttagcactcaaaaacgtaaaattcaagaggtatggcattcactgcagagaagtaaaaaaatataacttgtaacaaggagaaatatcaatagaaagagacccagaaataaaacaggatagaaataatagacagagatagtaaaacatttattatactacactgcatatgttgaagaaggtagagagattgagcatgttaagtagatatacagaagatagatctatctatccatccatctatctacctatctatctcaaatagaatatctagagatttttttaaaaaaattcattgaggattagtgaacttgaaaatatgtcaataaaaactacccaaaatataacacagagaaaaaaatcactgaggggtagagaaagaacagcacaccattgaactgtgggtcaatgtcaaatggcctaattagttgtaatttgagtaataaaaaagagaaagaggagggagagaagagataaaattttttttaaataatgaccaaaattaagttttcttcacaaatgaaactgaaatgaagacacttttcagacacataaaactgaaataattcatcatgaacagacctgcactaaaaggaatgtgaaagagggtcttcaggcaaaagggaaatgatatcaaatagtatctggatatacaaaaaggaaaaaagaacatttaaaatgataaatatatgggtaaatataaaatacaagttatctttaaaaaataatttactgtttaaagcaaaaataataatagtacatttgtggtttataacgtatgtagaagtaaaatgatattaacaataacacaaaggccaataggaggggaaatagaaactttactattataccattcataaagtagtataacattaattgaaggtaaatttatataaggtacagctgcacactattaatataaaccataaggcaatcagcaagaagattacagctaattagccaacgaaggagacaaaatgaaatcattaaaaagtttaacaaaaaataacgcagaatattgttggggggagctaagaactagtaagataaatagaaaacaaagagcaagatggtagatttatacccagctataccaataccacactaaatgcaaacagtgtaaacaccccatttaaaatgcagtgattgtgagaaaagacaaaaatgcagacctaagtatatgctttgtacagaaacctcctttaaatatatacaaataggttaatatatacaaataggttaaaagttaaaacatagaaaattatacaccatgctaacattaattaagatataggtggaaagatatattaatatacagtaaagttgatttcagaatacagaacattaccggggttaaaggtggtcacttcataataataaatgggttaaattattaaaaaaacataaaaatcctaaattatacacctaattacagagcttaaaatacataatacaaaattgatagaaccacaaagagaaacagatgaattcacaattatagttcgagtttttagcacccctttctcgataactaatataagacaaaatcagtaaaaatgaagaagacataagtaaaaggctatcaaccaacttgtcccaattggcatttataaaacacacaacccaaaaagagcagaataaatatacttttgaaatataaaagaaacaattactaagagataaaatatttcgaactataaaacaagcatcaaagcatttaaaagtattgaaatcataaagagtatagtttctgaccacaattgaatttgaaattaataacatccagaaaaccctccaaatgtttgaaaattaaattataaactactaaataagcattgataaaaaacagtagataatttaataaactaataaaaatatatcaaaggtgtgagatgcagctaaagcagcactttgagaaaaatttagagcttttattacctatattagcaaagaaaaagatcttaaattatgtaagctttcatcttaagaaggtagaaaaagaagagcaaattaatttcaaaaccagaaaaaaggagaacaataataaagatgatcagataaatcaataaaatagaaacagatcaacaatttaaaaaaagtgaaaccaaaacctagtttgaaaaattcaatgaaattaataaaccttccgccagagtgatcaaggtaaaaagaaagtacacacatttccttttataaggaaaggaatattaccataaaaactttagaaattaaaaagacaacaaacaaatattatttaaaaaattatgccaataaatttgacaatctaaatgaaatggacaaattcccagaaagacataaattacacaaggagaagtaggaaatttaacagcactatacaaattaatgaaactgaattctaattaaaattatttcctcaaagaaaactccaggtcaagataccattacttataaaataaaatctatgacacatttagaggaaaaaataatgccaattctataaaattcctgcagaaaaattgagaggaagaaagattttctgactcattctataaaaatacttttactctaataccaaatcatgacaaactatatcataaaacaagaaaacttcagactaatatctctcatgaatatagattcaaaaaataccaataaaaaatgttggcaaatttaatacaacaacatataaaaagactatagtgcttcataaggccaaggcaggaggatcatttgaggccaggatttcaagaccagcctgggcaacatagcaagatctcatctctacaaaactttaaaagataataaaattagctgggttcagtggcacatacctgtgatcccagatagtaaggacggtgaggcaagaagattgcttaagtccagaaatttaaggttatagtgagctataatcacacctctgcactcccatctggatgacagagtagagcctttcaaaaaaaaaagaaaagaaaaagacagaaaaaaaaaaaaccaggtgtggtggctcacttctggaatcccaatactttcggaagccaaagcagaatgattgcttgaagccaggagttcaagacaagcctggccaacatagtgagacccccatctctacagataagatttttgaaaaattagctgtgcatgataatgtgtgctggtagtcccagctactcagcaggcttaagtgggaggattgcctgagcccaggagtttgaggctttagtgagctatgaccatgccactgaactcaagcctgggtgacagagaaagacctcatctctaaaaaatatatatttttaaaattttttaaagaattatataatataaccagtgggatttatgccaggaatgcaatgttggttgaacatttaaaaatacatatgtaactaacctgcacaatgtgcacatgtaccctaaaacttagagtataataaaaaaaaaaaaaaaaatcaatcaatgtaagtcatcctatcaactgaaaacaaaaccaatcattttgatagatacagaaaaagcatttgacaaagtttaagatgctttcttaataaaatctcccagtaaactaggaaaagtgaacttcctcaatctgattaagttcatttaaggaaaatttgtacattattcttaacagcaagaggaacaatactttctacctaggataatgaataaagcaagaatcatctatcattatttctatttactatcatgctagatactagaagtactatcaagtgcattaaggtgagaaaaataaaaagcatgcaggctggaaaggaagacaactctatttgcagaaaacatcaaatttatataggaaaaccataagaaagccataaaatattactgaaacaaataataaggttgtagaatgcaaaatcaattttttttaagatggagtctcactcgtgttgcccaggctggagtacagtggctcaatatcagctcactgcaacctctgcctcctgggttcaagcgattctcctgcctcagcttcccaagtaagtgggattacaggagcccacaaccgtgcccagctaatctttgcagttttagtagagatgggatttcaccatgttggctaggctggtctcaaactcctgacctcaagtgatctgcccacctcagccgcccaaagtgctggattacagttgtgagccaccatgcccagcccccaaatttttaaataaattgtaattctatctactagcaaagaccaattatatattaagaaaaattcatttaaaacagcaccaagaaatactttggaataagtttaacaaaagatgttttaagacctgttcactgaaagctataaaatattacaaagagaaattaaagaccaaaataaatgaagatgttcaagactcaatattgttaagatggcaactttccctaaattgatctagattcattaaaatgacaatacttcccaaagcaatctacagattcaatgcaatttctatcaaaatactaatgtcatttttcacagaattagaaaaaatcttaaaattcatatggaaccaataaaagtgccagaatagccaaagcaatcttaagcagaaagaacaaagctgaagacataacattgcccagcctcacattacactacaaagctacagtaacccaaacagcatattgatataaaaatagacacatatctcaatagaacagaatcgagaacccagaaataaagccacatatctacacccaactgatacttaataaagtcaatgaaaacatacactgggaaaggacatccttttcaataaatggtgctgggaaaattggattgtcatatgcagaaacatgaaactggacccctatctctcactatatacaaaaaccaactcaagatggagtaaagacttaaatgtatgacctcaaactatagaactactagaagaaaacttgagaaaactcttctggacattggcctaggcaaaggattcattattaagacctcaaaagcacaagcaacaaaaacaaaaataggcaagtggggcttaattaaaataaaaccttctgacaacaaaggaaacaatcaacagaacgaatagccaacctgcagaatgggagaaaatacgtgcaaactattctggggactgacatccaaaatctacaaagaactcaaacaactcaacaacagtaaaacaaataaccccattaaaaaacaggcaaaggacatgaacaggcattttttccaaacaaagacctacaaattgccaacaagtatataaaaaatgctctacaacactattcattagagaaatacaaattaaaaccacaatgagatatcatcttatgtcagaatgactattattagaaagtcaaaaaataacatgttggcaaggatgtggaggaaagggaacacttacacattgttggtgggaaaataaactagtacaaactctgtggaaaatagtgtggatatttctcaaagaactaaaaatataactactattcaatccagcaatcccaatattaggtatctacccaaaggagaagaaatcattataccaaaaagataattccacttataagtttattgcagcactattcgcaatagcagatacatggaatcaatctaagtgtccattaatggatggttcgataaagaaaatgtgagctagatagatacatagatagatggatggatggatggatggatagatagatgatagatagatagatagatagatgatataggtacagctatatagagagatatataatggaatactattcagccatagaaaatgaaatcatatcttttgcagcaacataaatggaattagaggccattatcctaagttagatcaactcagaaactgtgaaatattacagtctcacttatagatgggagttaaataacgtgtccacatggacataaagtgtgaaataatagacattggacactcagaaaggtgggaaggaggaggatgagggatgagaaattacttaatgggtataaggtatattatttgggtaatggttacactaagaactcagaattcaccactatgtagtatattcatgcaacaaaactgcaattgtaccccttaaatgtatataaatttcagaaaaaaataaagaaaacaatggttttatgttttgtttatatcactaacctccatttgctacctagagagtggcatattatagatgctcattttaaaataatatccaaagcttagtttcctagtgctattttagtagttactatccaaaagacttgcatagaatcaatttttaaaaacatagaaatggcatgagaaaatactatttttaataagagttaaaatatttcaagatcttttaagtatttcttaaagcagtaatgtattaatcagtttaattcatgttttcacaggctgcttgatacttttcagctgtgacatttagtttatataattataacaaatgttcacaaaactcaaagtatataattttatataaaacactataatttatctttcaattattaaaaaaagttcttacttataagaatatatagcagttaatgctaaaattacaaatacaattacagactacttggtaatgtattggtttaacaccaagtgggtaaatataccataaaaaacacacgaatttatttatttatttattttttaatgttttttttttttttaattgtactttaagttttagggtacatgtgcacattgtgcaggttagttacatatgtatacatgtgccatgctggtgcactgcacccactaacgtgtcatctagcattaggtatatctcccaatgctatccctcccccctcccccgaccccaccacagtccccagagtgtgatattccccttcctgtgtccatgtgatctcattgttcaattcccacctatgagtgagaatatgcggtgtttggttttttgttcttgcgatagtttactgagaatgatggtttccaatttcatccatgtccctacaaaggacatgaactcatcattttttatggctgcatagtattccatggtgtatatgtgccacattttttaatccagtctatcattgttggacatttgggttggttccaagtctttgctattgtgaataatgccgcaataaacatacgtgtgcatgtgtctttatagcagcatgatttatagtcatttgggtatatacccagtaatgggatggctgggtcaaatggtatttctagttctagatccctgaggaatcgccacactgacttccacaatggttgaactagtttacagtcccaccaacagtgtaaaagtgttcctatttctccacatcctctccagcacctgttgtttcctgactttttaatgattgccattctaactgatgtgagatgatatctcatagtggttttgatttgcatttctctgatggccagtgatgatgagcattttttcatgtgttttttggctgcataaatgtcttcttttgagaagtgtctgttcatgtccttcgcccactttttgatggggttgtttgtttttttcttgtaaatttgtttgagttcattgtagattctggatattagccctttgtcagatgagtaggttgcgaaaattttctcccatgttgtaggttgcctgttcactctgatggtagtttcttttgctgtgcagaagctctttagtttaattagatcccatttgtcaattttggcttttgttgccattgcttttggtgttttggacatgaagtccttgcccgtgcctatgtcctgaatggtaatgcctaggttttcttctagggtttttatgaaaaacacatgaatttattacctagtggctaataaggtcacgaataacaactttctagtagctaaattcaatgatcacttttcagtctttctctaatttgatccctattgcaatatttgactttataatcaaacctttcttcatgatacattcttcttcctttggctttttataataacaagactctccaatttcttttttttttttgcccatcacttctaaagttcccttgggaaattatttttctctactgcttatatattttcctacattcttttctagacctacttcttttcataccttactcactcctcctgggccatctcagccttcaattaccattatatgtttatgattccaaaatctttatctgcagctcagaattcttccccaaatttcagaaaatgtatctaaatactcagtagatcactctacttgcatgtaccacaaaaatcttatacttagcacgtaacaaactggttatctttcctaccaaatcctgctttgctttttctgtatcctatctcagtgagtggcaaaaccttccactatgatggtcaggcctatcatctgttattctattccaaattcagcatattatgttagtcaattctactttgaagcatctcttgagtacatctatttttgcccattcttaatgctactatcaaatctttcacattgcaactccttaactggtctccttgtgtagtggttaattttatgtccacttaggtacccagtttttgaccaaataccagtctaaatcttgctatgaagatattttttatgtgattaatatttaaatcagcagattttgaatacagcaggttacccttcataatatggattggccttctgttgaaggccttataagaccaagttccctgagaaagaattctgactccagactgcctttagatgtaagacagcaacatcaatcatccctgggtctccagcctgccaacctgccctacagattttggatttgccagcctccatagttgtgtgagccaatttcttaaaacaatctagatagttgattgattgattgatgaatagacagaaatagaaatatatacacatacatagatatatacatatacatcctattggttgccaataggatatacatatacatatatgtatgcacatacatgtacataaacatcctattgttgtgtattctgaccttgcttccaacctattttccacaatgcatcctcagtcatctttctacaatgaaaatctcataatgccattcctgtttaaaagtctcctgccacgagaataatattcaaattccttatggggttttaatcatgtggtttatggggtgtttcacgaactgcttgctgcttatctttcagccttttccttctctgagtaattctcacatgcaataaagatacagtgggagaagagatcataatttgttttaagagtgtcaatacatccacattaggtcacttctatagcatggtttgcgatgttgctcttggaagcttgtcttgaactcatttttccagctctcccagtaagttacccaatatccatttaataaactccctttcttttttgaggagaggggagctattgctttaattgatcaggtttaaaaagccattgaattttcctaaaatattgattctcaagctttatcatgcatcaaaatcttctacaggacatgttaatacacagatggctgagccctacactgagaatttctgatcagtagttctagggtggggcctgggaattctgggaatttatatgttttttatactttaagtactgggatacaggtgcagaacgtgctggtttgttacataggtatacacgtgccatggtggtttgctgcacccatcaacccatcatctacattaggtatttctcctaatgttatccatcccctagtcccacaccccgcaacatgccccggtgtgtgatgttcgccatgctgtatccatgtgttctcattgttcaactcccacttctgagtgagaacatgcagtgtttggttttctgttcctgtgttagtttgctgagaatcacaatttccagcttcatccatgtccctgcaaaggacatgaactcatccttttctatggctgtataatattccatggtatatatgcaccacatcttctttatccactcctatcactgatgggcatttgggttggttccgagtctttgctattgtgaatagtgccacaataaacatatgtgtgcatgtgtctttatagcagcatgatttataatcctttgggtatacacccagtaatgggattgctgagtcatatagtatttctggttctagatccttgaggaatcatcacactgtcttccacaatggttgaactaatttacacacccaccaacagtgtaaaagtgttcctatttctccacatcctctccagcttctgtcgtttcctgactttttaataatcaccattgtaactggcatgagatggtatctcattgtagttttgatttgcatttctctaatgaccagcgatgatgagctttttttcatatgtatgtgggcctcataaatgtcttcttttgagaagtctctgttcatatcctttgcccactttttcatggggttttttttttcttgtaaatttgtttaagttccttgtagattctgcatattagtcttttgtcagatggatagattcaaaaaaaattctcccattctgtagcttacctgttcactcagatgatagtttcttttgctgtgcagaatctctttagtttaattagatcccatttgtcaattttgccttttgttgccattgcttttggtattctagtcacgaagactttgcccatgcctatgtcctgaatggtattgcctaggttttcctctagggttttcatggttttaggtcttacgtttaagtctttaatccatcttgcattaattgttgtataaggtgtaaggaaagggtccagtttcacttttctgcatatggctagccagttttcccaacaccatttataaaatggggaatcctttccccatttcttgtttttgtcaggtttgtcaaagatcagatggttgtagatgtgtggtgttatttctgaggcctctgttgtgttccattggtctatatatctgttttgttaccagtaccatgctgttttggttactgtaagccttgtagtatagtttgaagtcacatagcgtgatgcctccagctttgttctttttgcttaggattgtcttggctatatgggctcttttttggttccatatgaaatttaaagtagtattttctaattctgtgaagaaagtcagtggtagcttgacggggatagcattgaatctatgaattactttggtcagtatggccatttgcacgatattgattcttcctatccatgagcatgaaatgtttttccatttgtttgtgtcctctcttattttcttgagcagtagtttgtagttcgtcttgaagaggtccttcacatcccttgtatgttgtattcctaggtattttattctctttgtagcaattgtgaatgggagaataaactccctttctaatcaatcagccaactagtttctattgttagcaattaagaaccacaacttatatggcagttgttgtcaggaattaagtggtacaaaaacagaacctgaatgtggaattttggctcagtgaaggaagcaaagtaacagaagtgaggatatagccactgcactgattactatttaaatttaaattattggtaggttttcttttattttctttgctactaccagaaaaaaatgatggttccaatggcttatacaagatctccaaagaaaatgataatcttatttttgaaaactgactgtaaatataaatgaagcaatatttctaaaagatctccttagaatatttttgatgtttctactatagaaaatgtaagggacaacctgggaacacacagcagtggatagctttacttttgaatatcatataatcactacaagactcttgcaatgatttttgaggaaagaagacctacataaaaatttctaagtttttgaggatattctagtaacttacagccattgatcaagcaagttatagagtaccaattaatttttccattactaataatatcaactagagaaaagaaaatactgcaaaaatttctgctatagcctgaaaaagttattatttctatttattaatagcataataatctatgtattacacagcaaacaatccacttaatacttctaaacttaatgaaaatgtagtcagtgattttgaaataattcagctgtgaaaacaaattaattctaatgtttctattaatttagatacaatttttgaatacatacttgtattaattaatttatttaacaaatgtatattgcgtatgtgatttctgaagaaatttaactgactgaatttttatttccagaacagattatttctggccctattgcatatcaccaaataaatcaagtgacagtttacagagtactcaaaaagttatggtgatagagaaaagtagaaaaaatcaaactaatagctgagagctgaggatatatgaaaggaaaggtgaagaataaaatatagggtgactatcagtgtagtaggtagaataatgcaccagccctgaagatgtccatgtcctgatccctgaaacctttgaatatgttatgttacatgacaaggtgaaattaaggttgcagatggaatgaaggtcactgtttggctgaccatgagatggggagattatcttggattattcaggtgggctcaccgtaactacaagagtccttataagtgaaaaaaacaaacaaaaaaagacacagggagttagtgtcagggtaatgcaacatgaaatagactccactgaccactgtggactttgaggatggaaaggggccaagagccaaagaacaaaggcagcctttagaagctgaaaaaggaaggaaaacaaattcttccctacagcctccagaaagaagtgcagctcttccaacacattgatattaaccaagtgagactcattttgggattctgatctccaaaactgtaagattcaaaggacttaccctacatggatgctattaagttaacctttcagttcctcttgaccctgatatcccacgggggtgactttttccttttcttacactaatttccttaaatcatgattaactatatgaatttgagtactctctttcagaatgtattaacacattggatttacatggctctcaaaagtattctgaaatggaatgagacatattttgatcatgtgcttataggatttaggaatccaatggatatatacatatatataaacacacatacacatatacaaacacatatatatatacatatatacacataaatagaaaaacttacattcattttgaagaggatcagaatatgccacaccaatatatgccactttggcatatggattattttgagctgaaggcaactgagaatcaacagatgtagaaagaagtctactcagagcttcccttgtctgactaaaagcagaaacttatggaagtgagggctgcttggaataacctctttttgtagtgcaacctagaaatataactatatatatatattttttaataatactttaagttttagggtacatgtgcacaacgtgaaggtttgttacatatgtatataactatattatatatctgccacctcttcctgattttactttttcttcctcttttagttactcttttctcttattcctattctttcagtgtcaaatttcttgaatcactaacggatgctttctctgcttattcaacttgcattcagtctttgccctatgttcatcaaactttgtcatccatcttttctctgaaactacattagctaaggtcataaattacctaactgccaaaccattgagcactgttgtacatatgaggatatatcagtgaacaagacataaaagcccttgctctcatattgctatattttacttgaagggaagcaacagcaaacaaataagcaaaatgagaaaatataagctagtgatgtgttataatgaaaataaaataggaatatgtgataaagagtgttttgtggttgtctcttaaggaaaggctctgttagtaggtgactttaaagctcaggcatgaatataaaagatttaaccaggcaataatccaggtgatctagaacaaagacatttaattgtgaattaacttgagttattaaaagaactgtaaaaggttaatggtgcttggaacacagtgattgaggttggagaagaagcaagtacttgatcatatagacacctttaaatcaaggtgatacatttgaattttattttagatgtaatgaaaagtcactgaaggcttttaagcatgggaattaaatataatttaattataatataatttaattataattatatataacttataaaattataaatatatttatatataatatattgataatactaatatattattaacattaatatattatacattatgatatattgatataatttataaaattatagatatatttataaatttatataatttatatattataaatatataaataattataatataatttaatgatatacttttaaaaattactttatataagtaatgctctagagggattcaaaaacagaggcagtaaggctggttttagtaggatgtttattcattaagcaatttattcctaaatgccagataagacaactaatataatcccatgtaccaggtaaaaatatatctgagtcaacagttcacggtttacagaaactattggaatttgagagccaagagcaggttttggaaattcaaatacctgcaaaatttagacagttaaaaattaacttaagtgaataaagtgtaagaaatatatggaacagtaaaacctttagtaaactggaaagtctgtacaatttaaagaagcagctatgcttcagcttcagctgataattgctatatgagaactcaggctcagatctgattattcaagagaaaatatttgcattataatatttatatttagagaaaacccacttatatataatgtatactttaaaagagcaaaccatatagggttgagttataagcaatagtatttcttgctatcccaactactccctcaatctactgtgtacatcctaagctgtccaaggaatcattttgaaaactccttttcactaggtccagcatagggagatagggaagcatttcctacttcttcaaaaataggggaggcttaaaaaccaccaaaactccctttaaagaaatatttataatctctaacatctctcttggcctctctaacttctcttattaattgagttgggtggttacctaagagtcataaattactttttcattttctcttcaagccttgccaaggtgatttagtgccttgctttggaatttggggaatatttgccacctagttttggagacctcaatttaaactatcattttaacattctgttatatacaatattagaatgatactgttctaagcattgagaaattaagtgatttttcatgatcaaaaaaccagggcatgatagaagtagaattctaatccagggttttctaaatcaattgctcaagctttatgcactatttttgttgtctttattatcttttaatttctgtaaggatcaaatctatatacttgtgtttatacatttatgggatatatatcatggaatagatgttgtagagaaggaaaaattttctccaacctcttaacgttttctacttgagtgttgcaaattaaattaacaaatgacattaatggtagaatgagtttataaatgttattgatggtaatatttttattttacctgcatggggcttcacagaaaagaagtggaaacccaagagatgtttagacttgacagcttacatagcactcgaagttacctgaattccagagctgaatgtatccgagagctgacagaacactgaaaggtatttgaatttcaaacaccaagagtagagatatctcaatgctcaaccagaggcattcagtagtaaccccaaaaagattttaccttagtggtaggactaaagaattcctaaagtaaagccactctagacccatcctaattccctaatggcatatgaggcaaagcatattttcatatgcttatttgtgatccatatagcctctttggtgatatctgttcagaaattttaccaatgtttaaattaggttgttttcttattgttgagtttttaaagttctttaagcttgtggacagcaatacttttttagatacatgttttgcaaatattttctccaagtctgtggcctctcttttgattcctttaagagtgtctttcgcagggcaatttttatttttcattttttgtttaagaatacatttttaggccaggcacggtggctcatgcctgtaatcccagcactttgggaggccaaggcgggcgtatcacaaggtcaggagatcgagaccatcctggctaacacggtgaaactccatctctactaaaaatacaaaaaaaaattagctgggggtggtggtgggcacctgtagtcccagctacttgggaggctgaggtaggagaatggcgtgaacccgggaggcagagcttgcagtgagccaagattgcaccactgcactccagcctgggcgacggagtgagacttctagaatttttatggtgtcaggtcttagatttaagtctttgatccatcttgagctgatttttgtataaagtgagagaagagaatccagtttcgtttttatacacctggcttgccaattatcccagcaccatttgttaaatagggtgtcctttcctcatcttatgtttttgtttgctttgtcaaagataagttggctgtatttctgggttctctatcctgttccatttgtctacataactatttttataccaataccactgttttggtaaccatagccttgtagtgtagtttgcaatgggataatgtgatacctccatatttgttctttttgctttgtcttgctttggctaggtgggctcttttttggttccatatgaattttatgattgtattttctagttctgtgaagaatgatggtggtatttagatgataattgcattgaatttgtagattgcttttggaagtatagtcattttcacaatactgattctatccatccatgagcatgggaggggtgtccatttgtttgcatcatctgatttctttcagcagtgttttgtagttttccttgtacaggcctttaatctccttggttaagtatattcctaagtatttttttttttgcaactattgtcaaaggaattgagcttgatttcattctcaacttggtaactgttggtgtatagaagagctactgatttgtgtgcattatttttgtatcttgaaactttgctgaatctatttaccagttctaggagctttttagatgagtctttagagttttctaggtatacaatcatcacaaacagcaacagtttgacttcctctttaccagtttggatgccctttctttctttctcttgtctaattgctctggctaggatttccagtactatgttgactagaagtggtaaaagtgggtatctttatctttttccagttctcagggggaatgctttcaacttttccccattcagtataatgttggctgtgggtttgtcacagatggctttaccttaagatacgtcccttctctgccaattttactgagggttttaatcataaagcggtgctggattttgtcaaatgccttttctgtgtctattgagatgatcatgtgaatttggtttttaatcctatttatgtggtatatcacacttattgatttgtgtatgctaaactatgcctgcatccctggtatgaaacccacttgatcatggtggattatatttttaatatggtcttggattcggttagctagtattttgttgaggatttttgcatctatgttaatcagggatattagtctatagtttactttttatttaaggtcctttcttggttttgatattaggatttgatttagagaggattacctcttttatcttttagaatagtgtcaatagcattggtacagattcttatttgattgtctcatagaatacagctgttaatccatctggtcctggactttttttgttgttgttggtaactttttaattacaatttcaatcttgctgcttgttactatttagagtctgtttagagtttctatttcttcctggtttaatctaagaggtttgtgtatttccagcactttatccatctcctctaggttttctagtttatgcacataaaggtgttcatagtagctttgaacgatcttttgtatttctgtggtattggttgtaatatctcctgtttcatttctaatggggtttatttggatcttctctcttcttttcttggttaatcttgctaatggcctatcaattttatttatcttttcaaagtaccagtttttgtttaatttgtcttttgtatattttttagtttcaatttcatttagttctgctctgttattggttatgacttttcttctgctgggtttgggtttggtttggtttgttcttgtttctctagtttcttgaggtgtgaccttagattgtctatttgtgctctttcagacttttttatataggcatttaatgctatgaactttcctcttagcatcagctttgctgtattccaggagatttgataggttgtgtcactactattgttcagttcaaggaattttaaattttcctcttgatttcattgttgacccagcaatcattcaggaataggttatttaatttccattatttgcatggttttgagggttccttttgaagatgatttccagttatattccactataatagagagagcacttgctataatttcgattttcttaaatttgttgagacttgttttgtggcctatgatatggtctttcttggagaatgttccatatgctaatgaatggaaggtatattctgcagttgttgggtagaatgttctgtaaatatctattaaatccatttgttctagggtatagtttaagtccattgtttctttgttcactttccgacttgatgacctgtctagtactatcagtagagtattaaagtcccacactattattgttctgctgtctatctcattgcttaggtctagtagtaattgttttataaatttgggagctccagtgtgggttgcctgtatatttaggattgtcatattttcctgttggactaatccttttatcattatacaatgcccctcttttttaactgctgttgctttaaactttgttttgtctgatattaaaaaatagctactcctgcttgcttctggtgtccagttgcatggactatgtttttccacccctttatcttaagtttatgtgagtccttatgtggaaggtgagtctctcaaagacagcagatacttggttggtaaattcttatccattttgccactctatatctttcaagtggagaaattaggccatttacattcaatgttagcattgagatataaggtactattgtactcattgtgctatttgttgcctgaatactttgttgggtttttttttttcattgtattgttttataggtactgtgagttttatgctttaagtagattctattttggtgtatttcaaggatttgtttcaagatttagaactccctttagcagttcttgtggtgctggcttggtagtggcaaattctctcagaatttgtttgtctgaaaaagactgtatcttcccttcatttatgaagcttagtttcacctgataaaaaattcttgcctgataattgttttgtttaaggaaactaaagataggaaccaatcccttctagcttgtatggtttctgctgagaaatctgctgttaatctgataggttttcctttataggttacttgatgcttttgcctcacagctcttaagattatttccttcatcatgattttagataaccgataactatgtgtctaggtgattatctttttgcaataaatttcccaggtgttctttgagcttctcgtatttggatgtctagatctctagcaaggctggggaacttttccttgattattccctcaaatatgttttccaaacttttagatttctcctcttcctggggaacaccaatatttttcggtttgaccatttaacatcccaaacgtcttggaggcattttttttcttttttctttgtctttgttggattggattaaatcaaaagtcctgtcttcaagttctgaagttctttcttctacttgttcaatattattgccgagcctttccagtgcattttgtaattttctaagtgtgttcttcatttcaagaagttgtgattgttttttatttatgctatctatttcactggcgattcttccatttgtatcctgcatcattttttcttatttcgttaagttggacttcacctttctctgttgcctccttgattggctaagtagtcgaccttctgaattctttttctggcaattcagaggttttgttttggtttggatccattgctggtgagctagtgtgatcttttgggggtgtcaaagaaccttgttttgtcatattaccggaattgtgtttccagtttcttctcatttgggtagattatgtcagtgggaagatctgggactcaagggctgctgttcagattcttttgtcccatggagtgatcccttaatgtggtgctctccactttctcctgcggtggagcttcctgagagccaaactgtgcgattgttatttctcttccagatctaatcacctagtggagctactgggctctgggctggtactgggtggggagtgtctgcaaagagtcctgtgatgtgatccattatcaggtctctaagccatggataccaggacctgctccagtggagatggcaggggagtgaagtggactctgtgaaggtccttggttgtatttttggtaagtgtgttggttttgtgttggttggcctccagccatgaggtggggctttcaagagcacatcagctgcggttgtatagggaggatacaagcttgccctgtggtcacctttggataagtgttcaggtttctcaggtagtgtgcaggccaatacagctcccaaggcattatgtcgtttgtcttcaattagggtaggtagacaaagaccatcagttgaggggcagggctaggcatgtctgagctcagactctccttgggcagggcttgctgtggctcctgtgaggaatgggggtgtggttttcaggccaatggagatacattccggggggattacggctgcctctgctgcatcccacaggtcacccgggaagtggggaaaagcctgcagccacaggcctgacccagttcccaggcagcctgcagccgaaaggccagtttcactcccactgtgccccctcaacagcacagagtttatttcccggcagccggtgagcagggctgagaatctgccccaggctacaagcctctaagctgagaaagcaagcaggctcacggtttcttggctgtcccatagagcctgcagcagcaatccacctccttcaaagggtctgtggattctcttgtctttgttggtatgttcctgcagtaattcatgaagtaaaagttcatgatgtgggtctccacatgctgttctgtccatccaagtggtagctgcaagttagttccgcctcctatctgccattttgtgccttattttaataaaatccaagttaccgattcttttcttactattgtacctaaaaagctattacaaaagccacatcacctaggttttcttctgttatcttctaagagttttataattttgtgttttacatttaagcctatgatccattttgggttgatttttgtgaaagatgtaaggactgtgtctgcattttttttttttttttttttttggtatatggatgtccagttgttccagcatcacttgtttcaaagactatactttcccccactgaattgccattgtttctttgtcaaagattagttgattgtatttatacagatctattttggtgttacctattttgtatcattgatctatttatttattcttttacctgtacaacactgtcttaattactgtagctttataataagacttgaagtccagtaatgacagtctcccaactgctctccttcaagattgtgttggttattctgggtcttttgccattccatatacactttggaatcactttgctcttatctacaaaataacttgctgggactaaattgaatctatagatcaagttggaaagaactcaatcttgacaatattgaatattgctatccatgtacctggaatatctcttcattcattcattcattcattcatttgaaaaagggcctccctctgtcacccaggctggagtgcagtggcgtgatcgtggctcactgcaaccttgaacttctgggctcaagtgatcctctcaactcagcctcctgggtagttaggactgcgggtgcatgccacaacacatggctatttttttggttttgtttagaaactggggtctcacaacattgccccgggccagacttgaactcctggcctcaagaaatcctcctgcctcagcctcccaaaatgttgtgattacagccatgaaccatcaccttcaccacccccccatttatttagatcttctatgatttctttcatcagtcttctgattttcgttatatagatcttacatgtattttgttacatttatatataagtatttcagttattttagatgccaatgtaaatggtactgtgtttttaattgttcattgctggtatataagaaagcaactgacttacatatattaacctcatatcctgcaactttgctgaaatcacttgttagttccagaagtgtttttgttgattctgtgggatgtgctacataatcatgtaatctgcaaacaaagatagtgttatttcttccttcccaatctgtatatcttttgtttgcttttctgatcttactgtattacagctaggacttccactaagatgttaaatagaaatccttggggatacatccttaccttgttcatgatcttagcaggtaagcatctagttccttacaattaagtataatgttgctgtaggttcttggtagatgttctttatcaagttgaagaagttcccttccattcctagtttgttgagggtttttatcatgtgtgggtgtgagattttgtcaaatgcaatgcttactctgcatctactaatataatcatttaattgttttttctgtagcctgttggtgtgatggtttacattaatttttttaatgctaaatgagccttgtataactggaataaatcccacttggtcatagtgtataattctttttgtacattgttggatttgatttgctaatattttgtagatgatttttgcatttatgttcatgagacatattggtctgtagttttcctttctggtaatgtctttgtctggatttgatacttgggtaatgctaatcctccagggatgaactggaaatattccatctgcttctattttctagaagagattacagagaactgatataattttttccttgaatgttttgttagaattcaccagtaaacacatgtgggcctggtgctttctgttttggaagattactaataattggtttaatttcttcaatagatacaggcctattcagattatctatctgtcctcatgtgagtttgctacattatgtctttcaaagatcaaatatagttcttctgttttgctcactctttcttctgcttctggtagtccaaacgcacatctatgttacaccttttgaaactgtcacacagttattggatattctattcaccagcccacccccaattgccttccttctttacatttccatttgagaagtttctatttatctatcttcaaactcaatgactcattctatgtctgagtctaatctatagatacgtacatcaaagtcatttatttctgtacagtgtttttgatttctagaatttccttttgaatcttagagtttccacctctaggctttcattagtcatcttccatgttgcttacctgtatacattttgtctaatctctacattaaatcttttcacatagtttcattgttattttaaattccttttctaacaattccataatctatgctattgctgactctggttctgttaactgctgtatctgtttagatgattgtattttttctggtctttggaatgccttgtaattttttgttgaaaaccacacgtttgtattgattaataggaactgaggtaaatgacctttagagtatttacgttaatctgtgtaagtgcacttgatgtgtgctatagccatatatgccagagacttcaaatttctctagtgtcttcgtttgtgcctttgttcttgactttggacttcttgaaatattcctcctcagacagagtctgcacttgttattatatgaagactggttagcatgttatggtaagatgtgggagaaggaaaatgctcaatgattttatgattaaatctcagtcttgatataatgggtctgtgtgtctgggctgtgacattcacaagtgtttctccagttgtaacaccttttgcccccatctgatgagacaggaaggccaaggtggctaaagttgagcaatgcccttcccctaccttggataaggctctagtaaagccttttttccaggaaaatacttttttgttagggagaatgctctgagtatattttacaatgcttattcggaagaataagcaccctgccagagtcataaaggaatctttctcagatctctaccatgagaacctggtgggttccctaaaaggaaaagtattgggggttcccgaacatttcagtaaccagcagtttctcattctcatgctagtcccacattcagcacccaccaatttgaaaaaagttactatttgagtgtttctgtaagtttatggctttagtggcttctgcactatctgtgattatctggatttgcttttctcttcaggcttctggctgtaggttttcactgaaatctcagttctctaataggtccaagaaaagttgttaattttaagactgatcaacatcttattgttttaagaatgggagtaacaacttccaagctctttgcatgttgaagttgaaaccagaaatctaattaactgatttttaaaattattaagccaatcataaattcttatattaatccctagctgggtcaacttcttgctattttgttaaagagttttaaatcaccttgtcaatatttaccaaaaataaaaacaaaaacaacaaaccatgctgagatcatgattaggattggattgaatctctagcaatttggaaagaacctcttaatgacactgagtcattcaacacacaaacatgatctttttctccactgatttcagtcttctataatttctatctgctgtgttttataattttcagtatagaggtcttgaatatcctttgttcaattatccctaagtactttattatttttatcaatattaaagttaatttttatttagtttttcaatttattactcatatcacataaaaatataattattaaatatttgtttctgtaatcttgctaagtttacttattaggtctaatagttgctttttagattcattgagatttttacataatcaatatgtagatctgcaaatacagataagtactggaaagaatatgaatctactgaaacagtgacatattgctggtgagagtgtaaaattgtacccctattttggaaaatagcttggcaatttcctatgaagttaaatatatatttgccataagacacctaatgtttggtattcataatagccaaaagatagaaaaacaagtccatgaacaagtgaaaaaataagcaaactgtgacatatctatacatttgtatactactcagcaataataagtcatgaactactgataaataagtcttgaactacaagattaaatcattatgctgaaggaaatacctcagacagaaaacaatatatactgtataattccatttatatggaactcaaaaaaagacaaccctgctatgtggtgacagaaggttagtagtgttttcctacggtggatgttgatgtaagaggtagatattgtagatgacacaaacaaatagaaaagcattctatattcatggattggaagaattaatatcattaaaatgtccatactgctcaaaacaatctacagactcaacactattcctatctatttaccaacatgacttttcatggaattagaaaaaaaaattctaaaattcacatggaaccaaaagagcctgaatagccaatataattctaagcaaaaagaacaaagctggaggcatcatattacctgacttcaaactatatggcaaggctacagtaatcaaaacagcatggtactggtacaaaaacagacatacagaccaatggaacagaagagagagcccagaaataatgctgtatacctacaaccatctgatctttgacaaagttgacaaaaataaacaacagggaaaggatatcctaattcaataaatgatgctgggaaaactgactaaccatatgtagaatgaaactaatcccctacttctcaccataaaaaaggttaacttaaaatggattaaagacttaaatgtaacatctcaaactacacaatcttagaagaaaatctaggaaatacccttctagatattaacctcaaaggcaaatgcaacaaaaccaaaaattgacagttgggacctaattgaactaaaaccttccatacagcaaaagaaactatcaacagagtaaacaaatgacctacagaatgggagaaaatatttgcaaaccaggcatccaacaaaggactaatacccaaaacctataagaaacaaataactccgttgaaagtgggcaaagatcatgaacagacacttatccaaagaagacatacaagcacccaacaaacatataaaaaatgctcaacatcactaatcatcagaaagatgcaaattaaaaccacaatatgataccatctcacaccagtcagaatgactattattaaaaagtcggaaaataacagatgttggcaaggttgccaagaaaagggaacacttatataccattggtgagaatgcaaattagttcagcctctgtggaaagtagtttggagatttctcaaagtaaaaacagaattaccatttaacctagcaatcccattaatgggtatatatccaaaggaaaataaatcattccaccaaaaagtcatttggcctcatatgtttattacagcactattcataatagcaagaacatggaatcaacccaggtgcccatcaatgatagattggataaagaaaatgtggtacatatacaccatgcaatactatgaagccataaaaaaaagaataaaatcgtgtccattgcagcaacatggatgcagctggaggccattatcataagcaaattaataaagaaacagaaaatcaaatactgcatcttctcacttgtaagtaggaactaaacactgagtataaatggacacaaagataggaaccataaatactggagatatcaaaagggtggagggaagatggaaggtggataagggttgaaaaactacctatcaggtactttgtttcctacttgggtgatgggatcattagaagcccaaacctcagtatcaaacaacataccaatgtaacaaacctgcacatgcacatgtatcccctaaatctaagaataataataacaataataattacccaaataaaactgagcaaaatatttaaatcgacatttctctaaaggaaatatacaaactgacaataaatgcatgaaaagaaggtcaacatcattagtccagggacatgcctatcaaaaccaccatgaaataccactctacagccactaagatggctatattcaaaaaaataaacaatagcaagtgttggtaaagatatccatatggaagatataaagaaatttaagatctaacacattgctggtgggaatgtgaaaccatgcaacctttttggaattcaataatagcagctcctcataatgtaaaacatagagttaccacatgatgcagcaattcccttcctgaatacatgcccaagacaaatgaaaacatatgcacacaaaagcctgtgcacaaatgttcatagaagcatgatttataataaccaagaagtagaaaggcaatccaagtatccatcaactactgtaatgaatatataataaaatgtggtatatccataaaatagaattttatttgccaataaaaaaatcaagtattgatacatgcataaactttgcaaacattatattaaatgaaataagtcagtcacaaaagactacatatggcatgatttcatttatataaaatttccacaataaggaaatctatatagacagaaaatagatccatagtagctaggattaggaggatttgggggaaatagaaaatagaaagtgactgtctaataggtacagagtttctttctggagtgatggaaatgttctaaaattcactgtagtaattattgcacaaccccgtgaacataccaaaatcactgaattgtttactttaaatgattaaattatgtggtagccaagttatgtgtcaataaagcagcttaaaaagtttaacaacaaaacaaaaaaaaagatataacaaattcattataagtgtccagctttggatgggaaaggggctgaaaaagaggatttgggatcttaattgtatctgtaataactttttttttttaaaagtgaatattaccaggagtaacatctgttcattttggatggcagatttcttagactttgttacagcattctaagtattttctaagtatatttagctataatggtaagcaggtaaatgaggatgaagcttgagaggaatagagggtaccaagaactgatagtggcgcactagtatcacttgtccttataccatttgagtgtccactaggctaactcccaattatctgaaaatctcagaatgctcaaattgggaaaatattgtccttgctataaaaataaagggttgcaggactcatctaataggtactggcaacaaccaggagaccatactgagaaatggatgttagaagcactgaactggggagagtatagcatataagaacgaataaggggacggggattttactgattcagagacacttttctagaactgaggatttaacatggtaggaagtacacctgcagccaagcctaaatgttaccgggatagtttcaaggcttaaaaatgactatgataatgaggttgagatgctgtaactacctcggcgaagtacaaagaaagcagtcctgaaactccaagaggtagacatactagatttaaaacataatacaagaaagacaaccaaatgattatattcccctactgaacccaaataatatttctttcaccaaagcaataagtacaatcggcccttgaacaacacaagttcaaactatgttagtccacttaaacatgaattttttatttgcctctgccaccccagacagcaagacaaaccccttctcttccatctccttctcaacctactcaaagtaaagataacaaggatgaagacccttatgacaatctacttccactaaatgaataaatatattttctctttcttatgattttcttaatattttcctttctctagcttccgttattatacgaatacagtatacaacacatttaatgtatgagataggtattaattgactgtttatgttattagtatggcttgcagtcaacagtaggctattagtaaagtttttgtagagtcaaaagttgtacacaggcttttgacggtgtggcagatcagttcccctaacccccgtgttgttcaagggtcaactattatctgctagtgagaagctcagtgatagtttcttctgcttgccaggattgatggtagggaataatgctgtaacactaggttctctagtatcagtgagaaaaaaaacagaattctggaatagcagaagactaatattagacaccaaagggaaaattaaaataccttgcccagtttccataaatgagccagttctcagatccagagcctatcaattgaaggggagaccaattcctcttgaagaagatgctgcagtgccacaacaactatgtgtagtagtgattccctcactccttccccaaagatatatatagtcatttacctaaataattatgtactgctgaaaggggaagactcgaatctcttaaggactgttgaacttggagacttaaaacactatcatggccccccatatgcccaattaattaataggtctgagttctccaaaaatgatatgaatcatagcagacaactgtaaattcctacaaatttaaccaagtggtatttcaatcacacttgtaatatcagatgaagtatctttactagaacatgtcaacatagcctctagcatgtggtgtgcaactgttgatgtgttgaaaatatccccatttttaaaactcagtaggagtccaagcagatgcctttcgagttcttgagcaaggccatgatgtctgcatagggaacattcatcattcaaaaagaaattcctgacatgctactaggcccttgtagacactaaatagatgatctagaaaaaaacattacgatccaccaaataagaagagttggcacaatagcaaaaacatgatagaagtggtacattcagaattaggcccaactaagttcatatataagtgactcagatccccatttcacctttctctaattgcaccattattgcttcctctgctcatagctatgaacatgtaggtgtttccttataactaccacaaagaggagaaataagaatgcgctttttaaataaatgggtcatctccataaggtggtacagtaataaatgaactgctaccacattcagatgtggttgtgttaaaacagtggtgaagggaattcctcccactgagcaaggatccaagcagtacacttagtcataaacttggtatggacagagaagtaatgtgaggaaggataaatgcagactgttgggcagttgcaaatggcatgattggttggtcaggagtctagaaaataaattggaagattagagaccaagagggggaagaagcatgtgaatgaatctaggggagtgcatgcaaggtatgtggattcttatttcttatgtcaatgcctaacatagtacatctaccactgaagagacactaaaaacccagttaagtaggatgaccaattggtgaagataagtcagccattgtctgtcctcagccaccccactgccttcataatgaggaacagagtgaccaggtggcaggaatggaggctacgcatggaaccaatgttatgaaatccttctctttaaagttcatctactcactgtctctactgcatatccaaccagtcagaagaatccaagctaaaccatcaatatgatatcattcctcaaaagatcaaccacccacttggtaaaaaaaaaaaattgattatattaaaccgtaagaaactattccatcctggaaaagatagatattttatttattacaattgctacatattctaaatatggattttccttgtgctggaccactatctcagaaacataaagtgatttagcctcaacaaattccatataaaattgcctcaaaccaaaggacccagttgacaatgaaggagatgaaataaaggacacattaccattgaatatactagtagtactattatcacataagctaaaagctagcagcctaagagtgtgctggaatagcctcttaaaccattgtaaggaaccagcttaaacatgatactatatagttttaagtgtgttattattcaagatgaggattaatacttccagtcaatgtccattatttggtgttgtatccccattagttgtaatatataggtttgagaaccaaaaagtagaagtagaaatggtttcctcataccatcattctcaatgtctattttggaaatgtgcacttcctgtctatataaatttagtcactgttgcactagagacattagttccaggggagggaatgcttctacaaggggatataagaattacagtaaacctaaggctaccacttggatactttagaacctctcatgacactagaccagctggcaaaggaatgagttattatactgggaactgaccctgattattatgaggggctagagttgttgctactaaaagtggtccaggagaagcttattattgaggcgtcgatgcccagtactaatcacttataagcaaatggagaaagcacagcttaacaagtactctgacacccagaaaaggcctacataaacccagtaggaaagaaacctaaaatagcagaagtgctggatgagagtaaggaaaatctataaaaaacggtaaaagaaaaaatgataaatatctattacaaccttagaattaaccatagcagcaggaaagtatagttttttccactaactctcccattataaattttttttaatgtcataaatgaataacacctgtaagtattagtttacatagtaaacttaacatggagcataagagtaactgtgtagtaaaagatgtgtatctgtagaagatgctgtcagtatcctgaccacattcttttgaccattacaatttctatgcaggcagggtaaccttcaactacaagcagtgcaagcttcaactacaagcagttaaaggctttctctaaccactgatgctcattctgcctatgtaaacaacagatcagaagtactagtgaataatatcccaccctcatcctgttatctcctgctgcgtcaagtaatgatttaacagagttgaatatctcattcctgaggagaataatgctgctatatctattaaagaattttaatttctagtttaaaactttccaagaaaaaaattcatacccaaatggtttcactgttgaattccagcaaacatttaaggaattaaaaaaacactaatttcacacaaactcttcccaaatatagaatagatgcaaataattctcaattaaatttgaggccagaattttattaataactacaccagccaaaactattatcataaaagaaagctacagacaaatattctttagaaacaagaaaaacagtcaacaaaatcctcagtgatcaaaaagaacaatatataagatagataatgtatcataatcaagggggcttatcacagaaatgtaaagtaacttcaatatctattcaaaattaatgtagtttaacatacaagtagaatttaaaaatgtaaaagtataatttcaataacttttaaaaagctggagaacttccccaatctagcaagacaggccaatattcaaattcaggaaatacagagaacgccacaaagatactcctcaagaagagcaactccaagacacataattgtcagattcaccaaagttgaaatgaaggaaaaaatgttaagggtagccagagacaaaggtcgggttacccacaaagggaagcccatcagactaacaggtgatctctcagcagaaactctacaagccagaagagagtgggggccaatattcaacattcttaaagaaaataattttcaacccagaatttcatatacagccaaactaagcctataagtgaaggtgaaataaaatccttcacagacaagcaaatgctgagagattttgtcaccaccaggcctgccctaaaagagctcctgaaggaggcactaaacatagaaaggaaaaactggcaccagccactgcaaaaacatgccaaattgtaaagaccattgatactaggaagaaactgtatcaactaacaagcaaaataaccagctaacatcataatgacaggatcaaattcatacataacaatatcaaccttaaatgtaaatgggctaaatgccccaattaaaagacacggactggcaaagtggatagagtcaagatccatcagtgtgctgtattgaggaaacccatctcacgtgcagggacacacataggctcaaaataaagggatggaggaagatctaccaagcaaatggaaaacaaaaaaaggcagggattgcaatcctagtctctgataaaacagactttaaaccaacaaagatcaaaagagacaaagaaggccattacataatggtaaagggatcaattcaacaagaagagctaactatcctaaatatatatgcacccaatacaggggcacccagattcacaaagcaagtccttagagacccacaaagagacttagactcccacacaaaaataatgggagactttaacaccccactgtcaacattagacagaacaacgagacagaaagttaacaaggatacccaggaattgaactcagctctgcaccaagcagacctaacagacatcaacagaactctccaccccaaatcatcagaatacacattcttttcagcaccacaccatacctattccaaaagtgaccacatagttggaagtaaagcactcctcagcaaatgtaaaagaacagaaatcataacaaactgtctctcagaccacagtgcaatcaaactagaagtcaggattaagaaactcactcaaaaccactcaactacatggaaactgaacaacctgctcctgaatgactactgggtacatgacgaaaagaaggcagaaataaagatgttctttgaaaccaatgagaacaaagatacaacataccagaatctctgggacacatttaaagcagtgtgtagagggaaatttatagcactaaacgcccacaagagaaagcaggaaagatccaaaattgacaccctaacatcacaattaaaagaactagaaaagcaagagcaaacacattcaaaagctagcagaaggcaagaaataactaagatcagagcagaactgaaggaaatagagacacaaaaaacccttcaaaacatcaatgaatccaggagctggttttgtgaaaagatcaacaaaattgatagaccgctagcatgactaataaagaagaaaagagagaagaatcaaatagacgcaataaaacatgataaaggggatatcaccaccgttcacacagaaatacaaactaccatcagagaatactataaacaccactatgcaaataaactagaaaatctagaagaaatggataaattcctggacacatacaccctctcaagactaaataaggaagaagttgaatatctgaatagaccaaaaacaggctctgaaattgaggcaataattaatagcctaccaaccaaaaaaagtccaggaccagatggattcacagccaaattctaccagagttacaaggaggagctggtaacattccttctgaaactattccaatcaatagaaatagagggaatcctccctaactcattttatgaagccagcattatcctgataccaaagcctggcagagacacaaccaaaaaagagaattttagaccaacatccctgatgaacatcgatgcaaaaatcctcaacaaaatactggcaaaccgaatacaggagcacatcaaaaagcttatccaccatgatcaagtgggcttcatccctgggatgcaaggctggttcaacatatgcaaatcaataaacgtaatccagcatataaataaaaccaatgacaaaacccacatgattatctcaatagatgcataaaaggcctttgacaaaattcaacaacgcttcatgctaaaaactctcaaaaaattaggtattcatgggacgtatctcaaaataagaagagctatctatgacaaacccacagccaatatcataccaaatgggcaaaaactggaagcattccctttgaaaactggcacaagacagggatgccctctctcaccactcctattcaacatagtgttggaagttctggccagggcaatcaggcaggagaaggaaataaagggtattcaattaggaaaagaggaagtcaaattgtccctgtttgcagacgacatgattgtatatctagaaaaccccattgtctcagccccaaatctccttaagctgataggcaacttcagcaaagtctcaggatacaaaatcaatgggcaaaaatcacaggcattcttatacaccaataacagacaaacagagagccaaatcatgagtgaactcccattcacaattgcttcaaagagaataaaatacctaggaatccaacttacaagggatgtgaaggacctcttcaaggagagctacaaaccactgctcgatgaaataaaagaggatacaaacaaatggaagaacattccatgatcatgggtaggaagaatcaatatcatgaaaatggccatactgcccaaggtaatttatagattcagtgccatccccatcaagctaccaatgactttcttcacagaattggaaaaaactactttaaagttcatatggaaccaaaaaagagcctgcattgccaagtcaatcctaagccaaaagaacaaagctggaggcatcacgctacctgacttcaaactatactgcaaggctacagtaaccaaaacagcgtggtactggtaccaaaacagagtagaccaatggaacagaacagagccctcagaaataatgccatatatcttcaaccatctgatctttgacaaacctgacaaaaacaagaaatggggaaaggattccctatttaataaatggtgctgggaaaactgcctagccatatgtagaaagctgaaactggatcccttccttacaccttatacaaaaattaattcaagatggattaaagactcacatgttagacctgaaaccataaaaaccctagaagaaaacctaggcaataccattcagttcataggcatgggcaaggacttcatgtctaaaacaccaaaagcaatggcaacaaaagccaaaattgacaaatgggatctaattaaactaaagagcttctgcacagcaaaagaaactaccatcagagtgaacaggcaacctagagcatgggagaaaatttttgcaatctactcatctgacaaagggctaatatccagaatctacaatgaactcaaacaaaattacaagaaagaaacaaccccattaaaaagtgagcaaagcatatgaacagacacttctcaaaagaagacatttatgcagccaaaagacacatgaaaaaatgctcatcatcactggccatcagagaaatgtaaatcaaaaccacaatgagataccgtctcacaccagttagaatggcaatcattaaaaagtcaggaaacaacaggtgctggagaggatgtggagaaataggaacacttttacactgttggtgggactgtaaactagttcaaccattgtggaagtcagtgtggcaattcctcggggatctagaactagaaataccatttgacccagccatcccattactgggtatatacccaaaggattataaaacatgctgctataaagacacatgcacacgtatgtttattgaggcactattcacaatagcaaggacttggaaccaagccaaatgtccaacaataatagactggatcaagaaaatgttgcacatatacaccatggaatactatgcagccataaaaaatgatgagttcatgttctttgtagggacatggatgaagctggaaaccatcattctcagcaaactatcgcaaggacaaaaaaccaaacaccgcatgttctcactcatagctgggaattgaacaatgagaacacatggacacaggaaggggaacatcacacactggggcctgttgtggggtggggggctgggggagggattgcattaggaggtatacctaatgtaaaatgacaagttaatctcttaaaagaaaatatagtaaaaatactttgatactgatcttggtaatgattgttttgaatatgataccaaaagcaaaggcaaaaacaacaacaaaataaacaaatgggactatatcaaactgagtttctgcaaataaaatcatcaacaaaattaaaggccactgaagattagcagatcatatttatttgcaaaccatatatctgatatgcatatataaaagaaactcatataactcaataacaaaaaaaaccctcaaattttaaaatgggcaaatgacctgaatagatattttccaaagaagacacacaacagatggacaatagatatatgaaaatgcgctcaacattactaatcatcagggaagcactaatgaaaacaacaatgagatattatctcacatcgattagaatgcctattatcaaagagaagaaagataagtgttgatgagaatgtgaagaaaaagaaacaactgtacactattagtgaaaaacataaattggtacagccattttggaaaacagtaaaaaggatcctcaaataattaaaaatactatatgatccagtaatctctcttctgggtatatatgaaaaaggaaataaaatcagtatgtcatagatatatctgcacttgaaggttcattaaagcattattcattatagccataatatgagaacaacctaagtgtctgtcaatggatgaatggataaaaaaatgtggtgaatgcatacaatagaatattattcggccttgaaaaagaggaaagagccaagatggctgactagacacagctaggaagagcttctctcactgagtggccagaccatgaagatcagcacaccccaatgaaatcttcagaaggaaggctttgagagtgaatggacagagaatgcagaatctgcgctgaagggagaggaagctgggaaccctatacagggttgcagagcactaggactcattcctggccccacgaagctcctggagaaagaatgagttaaataggcatggagtggcccactcttgccatgtaaccaaggacacctagatgcaggagactccatgagctccaagtgggagctgcttgggagttagcagagacaggactccatcctgcaaagcccagagggtttgacgtgggaatggctgcagtggagcacagccagggatacccatcctccaaggctcaccacactgttccaggtggcttaggtattttttgactgtcaaacttgcacagaacagagctatcgtgcctgtgggatgtgaccagtctgatctgagtatcccctttctgcaagaattcccgaggatctctgcctggccacatccacttgcagtgtagcctcagatgctcaaccagggcacttccaagtagctactgctatagctcttttactggaagacccagcctaactgtaagagagttttttcacatgggccttgccagcatgcatccacctgcagcctccccaatggctatgccagtacacatgcctatgcacagaccctgccatgctgctgccacctgccactcccagcacatgcatgtgggcatggatcatgttgccatcaccttgacaaagggcttttgccagcatccaccaatgcagtatcattgccagaggaccagaaacacttacccccttccccccgccaccccggctgagtacatcaaatggttaactttgagaagccagagaacaaagccataggcttgatcccagcaaccccaggattaaagtgcacagcccaagagtgctgagttgagccatggcctcctgaaatcatccagaaatgaagccagtcaactaaacccaacttataccacagtcgaacattcaaaggtagcaaagaatataaaaagaaaaagccccatccaaaggacagcaacttcaaagattaaaggaacatcagcccacacagatgagaatcagtgcaagacctctggcaactgtaaaatccggagtgccttcttacctccaaatgaccatattagcttcccagcaatagttcttaaccaaactgaaatggctgaaatgacagacatagaattcaggatctggatggcaatggcaatgatcatcaagattcaggaggaagttgaaattcaatacaaaagaaatctaagaaatccagtaaaacaattcaagagcagaaagatgaaatagccatttaagaaagaacctaactgatctgatagacatgaaaaactcaccacaagaatttcataattcaattggaaatactaacagcagaatatactaagttcaggaaagagcctcagaactcaaagactggctcttcaaatctattcagtcaagaaaaaaataaggaaaaaagaatgtaaaagaatgaacataatatataagatatatggaatttttatagaccaaatctatgactccttagtgtcactgaaagagagggggagagagcaagcaacttgtaatacatatttgaggattttcttcatgaaaatttccccaacctcactagagaggttcacattcaaattcaggaaattcagagaacccctggaagatactatgcaagatgaccacccccaaaacacacagtcatcagattccccaagctcaatgtgaaggacaaaatattaaagacagctagagagaaggggaggtcacctaaaaagggagccccatcaggctaacagcagaactttcagcagaaaccctgtaagctagaaaagactgggggcctatattcaacatcattaaagaaaagaaatgtcaatcacaaatttcatatcccaccaaactaaaggagaaatgaaatatttttcagacaagcaaataaaggagacaaataaaggagaaatgcaatatttttcagacaagcaaatgctaagaaaatttgttaccatcaagacctgccttacaagagctctttaaggaagtgctaatcctgaaaatgaaagacttaccacccatcacaaaaacatatgtaagtacacagaccattgacgctataaagcaactacacaataaagtccacaaaaaaaaaccccagctaacaacacaatgacaggatcaaattggcacatgtcaatattaatcttgaacataaatgggctaaatgactcattttaaaggcacagcatagtcaattagataaagaagcaacacccaactgtacgctgtcttcgagagaccaatgtcacgtgtaatgacacacataggatcaaattaaagggatggagaaagatctatcatgcaaatggaaaagaaaaaagaattggggttgctattcttatttcagataaaacaaactttaaaccacaacatcaaaagtaacaaggaaggtgtaatctcagcactttggaaggccaaggtaggcagatcacttcagatcaggagttcaagacaagcctggccaacacggtgaaaccacatctctactaaaaatacaaaaattagctgaacgtggtagcatatgcctgtagtcccagctactcgggaggctgagccacaagaatcacttgaacccgggaggaagaggttgcagtgagccaaaatcatgccactgcactccagcctgggtgagagaatgagactccatcactcagaccataggacaacaaaaacagaaatcaatatgaagatctcacaaaacatacaattatatgaaaattaaacaatctactcctcaatgatttttgagtaaacaatgaaattaagcagaaatcaagaaattcattgaccatcttaacaatattgattcttcctatccatgagattggagtgtttttccattcatttctgtcagctctcacttcattcagcaatattttgtaattctgattgtacagatcttccactgcccaggttagctgcattcctagatttttgttcattttgtggctattgtgaagaggaatgcattcttgatttaactctcagcttggatgtttttggtgtataggaatgctattgatttttgaacatcaatttttgtatcttaaaactttgcagcaaactaacagaaaaacagaaaaccaaacaccacgtgttctcactcctaattaggagttgaacaataagaacacatggacacaggcaggggaatatcacacactggggcctgttggggaatggtcagctaggggagggatagcattaggagaaatacctaatgtagatgatgggttgatgggtgcagcaaaccaccatggcacgtgtatacctatgtaacaaacctgcacgttctgcacatgtaccccaaaatttaaagtataatattaaaaaaaaactttgccaaagatgtttatcagatcaaggacctttggggcacagattacagggtttcctgggtataaaatcatattgtctgcaaacagggatcatttaacttcctctcttcctatttggaggactttacttctttctcttccctgattgctctggctaggacttccagtactatgttgaattggagtggtaaaagggggcacatttgtcttgttgtggttttcaaggggaataattacagctattgcccattcagtatgatgttggctgtgggattttcatagacggcactaattattttgaagtatgttccttcaatgctttgtttgttgagggtttttaacatgaagggatcttgaattgtatagaaagctttatctgcaactattgagatgatcatgtggtttttgtctttagctctgtttatgtgatgaatcaaaattattgatttgcatatgttgaacaaaccttgcattctaggtataaagtgtatttgatcttagtggatcagctttttgatgtgccgctgaattcagtttgcttctatttcatttgcttatatttctgcatccacattcaaagacaatattgacctgaagttttcttttttcattgcctctctacacagcacaggaaactatcaacagagtaaacagacaatctacagaatgagagaaaatatttgcaagctatgcatctgacaaaggtctaatatccagactacaaaagcttaaaaacaaattaaaaagcaaaaaacaaacaaccccactaaaaattgggcaaaggacatgaacagatgctactcaaaagaagacatacacatggccaacaagcgtatgaaaaaatgttcaatcattagagaaatgcacattaaaatcacaataaaatatatcataccagtcagaatggctattgaaaagtcaaaaaataacagatattggcacagttatggagaaaagggaatgcttattcactgctgatggcaatgtaaattagttccactcctgtggaaatcagtttggagaattctcaaagaacttaaaacagaactatcattcaactaaacaatcccactagtgggtatatacccaagacaatataaatcattctaccataaagacacatgcatgcatatgttcagtgaagcactattcacaataggaaagacatggaatcaacctaaatgtctatcagtggtgaatgggataaaggaagtgtgatacatatacaccatggaaaattatgcagccataaaaaaaatcatttcctttgcagtaacatggatggagctagaggccattatactaagcatgtcaacacaggaacagaaaaccaatactgcatgttctcacttacataagtgggagctgaacattgagtacacatggataaaaatgatgaaacaccagtgcctacttcagggtggtcagtgaaaggaggataaggattgaaaaactattgactactatgctcattacctgagtgatgatataatctgtagaccaaatccccatgacatgcaatttacccatgtaacaaacctgaacatgtacccccctgaacctagaataaaagttggaaagcaagaaaagtgggaatttctctcatttgcaacaacatggatgaatgtggaggatattaagataagtgaaaaactccagacacagatagaaaaacagtgtgtgattacacatatatgtgaaatctaaaaaagttgaattcataggagcagggtaaaatggtggctaccagtgccaaggaggctgggaaaatggggagatattagttaaagtgtacaaagtttcagttatacaggatgaatgagttttagaggtttaatttagagcatgatgactatagctactaatactgtgttgtatacttgaagtttgctaaaagaacagaccttaagtctcaacactcctcaaaatggtaactatgtgagtatatgaagacaaagatatgttaattgacttgactatagtaatcagttcaaaaaatatatatgacattgtataccttaaatatacattatattaatttaaatttttaaattaaaaataactatcactaaaaatttcccaattttattgaaaatgtaaacttatagattcaaaaatctgcgtaaacaccaaataagataaacccagagatatgcatgccaaggcacatcataattaagctttaaaaactaaaacaaaacaaaacaaaaatatggaaagcagccagaaaaaaatactgtattacaaataaaaatgaatttgaatgatagcatgtctctcttctgaaactatagaggccagaaggagacgttacatttttcaggttctgaaagaaaactgctaattgtgtattctacacccagaaaaaaatatccttcaggaatgagagtgaaataaagacattctcagatgaagaaaaactaagataatttgattctgtaaaacctacccttgaaaatggctaaaggaatttccccagcagaaaggaaatgataagaaaagaagtcttgaaacttcagagaggaaatagtaacataagaacgggtggaaaatgtggttcaatataataaactattctaattcttattagtttcgtaagtcatatttgattgttgaatccacagttataacattatctgatatggcgctcaatgtatgtaaaaaatacttaagaaaattatattattctagggtaaggagacttaagtggaagtaaggtttccatgcctcactaagagtaaaaaaaaatgttgataactgtagactgtgataatttacatgtttattgtactaccgagagaaatcattaagaaaattctacaaagcaatatactcaaaacaacataaataaatcaacattaaatcattaaaaatgttcaattaatgcacaagaaggtaagaaaagagaaacagaagaacaagaaaaacaggaaacagccaggtgtggtggcttatgcctgtaattctagatatttgggaggccaaggcagaaggatcacttgagcccaggagttcaagatcagcctggttgacatagggaaaccctacatctacaaaaaataaaaaaattagccaggcatggtggaacactcctgcgatcccagctactggggaggctgaagtgaaaggatcgcttgagcctagaaggtcaaggttgctgtgagccatgatcatgccattgcattccagcctggatgacagagaaaaattctgtttcaaaataggaaaagaaaacaaaaagagaaaacaagcagaaaacacttttttaatttgcagacttaatccctaaaatataattaccttaatggtaaatgtcttaatatatcaatttttaaaagtaggttgaggaaatggataaactcctggttacataaaacctcccaaaattgaacctggaaaaaaaatagaaaacctggacagccaataatggataacaagattgaatcagtaataaaaagtcttccaacaaagaaaagcccaggacccaatggcttcactgccaagttctaccaaatgtatgaagaactaacaccaattgtcctcaaactattccaaaaaattgaagagtaaattccccctaattcaatgtataaggccagaaataccctgattaaaaaaaccagaaaaccatgcaacaaaaaagaaaactacagaccattactcatgatgaaaaaagatgcaaaaatcaacagaatactagcaaacccaattaaacggcacatcagaaagataatatagcatgatcaagtaggatttatctcagagaggcaagggtacttcaacatttgcaaagcagtaaatgaaatacatcaacaaaataaggacacaaatcatatgatcatctaaacagagaaaaggactagataaaattcaacatctcaactctcaaaataaaaaatgctcaacaaactaggcattgaagaaacataccttaacatgaaaaaggtcatatatgataaacccacagctaacatcatactgaatgtggaaatgctgacagccttttttctaagacacagaaaaagaaaaggatatccattttcaccacatccataaaacatagtactgaaaattctagccagagcaattaggcaggagaaaaaaataaaaggcatccaaattagaaaagaggaagtcaaactgtccctttgcagaaataatcttatattcagaaaaacttaaagactgcaccaaaaaattcttagaactaataaacaaattcattaaagttgcaggacaaaaaaaaattggcacacaaaaatcagtagcatttctatacatcaattatgaaaaagctgaaaaagaaattgagacagcaatcccgtttacaacagtcacaaaaataaaaaggaatacatttaacaaaggagttgaaagacctctccaaggaaaactacaaaacactgatgaaagaaatttaagaggacacaaacagatggaaacatatcccatgctcatgaattggaagaattattattatctaaatgaccatactacccaaagccatctgtacattcaatgcaatctctattaaaaaaatcaatgatattctcacaaaaatagaaaaaaatcctaaaatttatatggaaccaaaaagagcctgagtagcaaaagcaatcctaaagaaaaagaacaaagctggaagcatcacactacctgatgtcaaaatatattacaaggcaatatagacaaaacagcatgatatggatataaaaacagacatgtagaccaatggaacagaacacagaattcacaaataaatccacatatttacaaccaactcatttggtgcaaagaacatacaatggggaaaggacagtctcctcaataaacagggttgggaaaactggacatatccttatgtagaacaatgaaactagacccctaaatctcagaatacgcaaaactcaactccaaatgcttaaagccttaaacataagacctggaactgaaaatactagaagaaaacataggggaaacactgcagtacatggtataagaaatgatttattaagaaagactgtaaaagcatacgcaacaaaaacaaaaatagacaaataagatggtattaaattgaaaacctactgcagagccaagaaaacaattaacagagtgaagaggctacctgttcaataagagaacatatttgcaaactatccatctaacaaaggactaatatccagagtatataaggaactcaaatagttcaacagcaaaatcaaacaaacaaataaataatcccattaaaaactgggcaaaagaccagggcagacatttctcaaaagaagacatacaaatggtcaaaaggcacacgaaaaatgcttaacatcactaaacatcagatacatgcaaatcaaaaccacaatgagatatcatcttactccagttaaaatgtctattatcaaaaagacaaaaatagcagatactggcaaggatgtggagaaaaggaactcttatacacgggtggcggcagtgtaaattagtataggcattacagaaaacaatattaaggttcctcaaaaagctaaaaatagaactaccatattatccagcattctactactgagtatttatccaaaggaaaggaaattagtgtaacaaaggaatatctgcagttccatgtttattacagcactattcataaatgcaaagatatagaatcaagctaagtttccatcaatggataaataataagaaaaatgtggtatatatacaaaatgaaatctattcagttatttaaaaaaagaataaaatcctgtcatttgcagcagcatggatagaactgcacgtccatcatgttaagtaaaatcagccagtcacagaaatataaacatcacatattctcactcatatgtagtagataaaaaaaattgatctcatgaaggtagagtgtagaatggtagtttaacagaggtgaggaaggctgcatgggggaaggacaagagaggttagttaatgggtacaaatatacaactagatagaaggaatgaggtctaatgttcaatagcagagtagggtgattataattaaaaacaatgttgttttatatttcaaaatagctaggagacaggacttaaaatgttcccaacatatataaataataaacacttgaggtaatggatatgctaaacattctgagttgatcactacacattgtattcatgtaatgaaatattgcctatgctccataaatacagagaaatattaagaatcaatctaaaaataaataaataaataagtttttttaaagaaaaaagcagattgacatagattttctttagtgatccaaaaaaatgttctctacaataaatcatttcaaatacaatgacataggtcaatttaaagcaaaaacatggaaagaaatataccatataaatattaatttttttaaaaagcagcaatcactatatggattttttttattatactttaagttttagggtacatctgcacaacgtgcatgttagttacatatgtatacatgtgccatgttggtatgctgcacccattaactcgtcatttaacattacatatatctcctaatgctatccctcccccctgcccccaccccacaacaggccccggtgtgtgatgtttgccaccctgtgtccatgtgttctcattgttcaattcccacctatgagtgagaacatgcggtgtttggttttttgtccttgtgatagtttgcttcaaccacgtccctacaaaggacatgaactcatcattttttatggctgcacagtattccatggtgtatatgtgccacattttcttaatccagtctatcattgttggacatttgggttggttccaagtctttgctattgtgaatagtgccaccataaacatacatgtgcatgtgtctttatagtagcatgatttataatcctttgggtatatacccagtaatgggatggctgggtcaaatggtatttctagttctagatccctgaggaatcgccacactgacttccacaatggttgaactagtttacagtcccaccaccactgtaaaagtgttcctatttctccacatcctctccagcacctgttgtttcctgactttttaatgatcgccattctaactggtgtgagatggtatctcattgtggttttgatttgcatttctctgatggccagtgatgatgagcattttttcatgtgtcttttggctgcataaatgtcttcttttgagaagtgtctgttcatatcctttgcccacttgttgatggggttgtttgtttgtttcttgtaaatttgtttgagttcattgtagattctggatattagccctttgtcagatgagtagattgcaaaaattttctcccattctgtaggttgcctgttcactctgatggtagtttcttttgctgtgcagaagctctttagtttaattagatcccatttgtcagttttggcttttgttgccattgcttttggtgttttagtcatgaagtccttgcccatgcctatgacctgaatggtattgcctaggttttcttctagggtttttatggttttaggtctaacatttaagtctttaatccatcttgaattaatttttgtataacgtgtaaggaagggatccagtttcagctttctacatatggctagccagttttcccagcatcatctattaaataaggaatcttttccccatttcttgtttttgtcaggtttgtcaaagatcagatagttgtaaatatccggcattatttctgagggctctgttctgttccattggtctatatctctgttttggtaccagtaccatgctgttttggtaccagtaccatgctgttttggttactgtagccttgtagtatagtttgaagtcaggtagcgtgatgcctccagctttgttgttttggcttaggattgacttggcgatgtgggctcttttttggttccatatgaactttgaagtagttttttccaattctgtgaagaaagtcattggtagcttgatggggatggcattgaatctataaattaccttgggcagtatggccattttcacgatattgattcttcctatccatgagcaaggaatgttcttccatttgtttgtaccctcttttatttcatcgagcagtggtttgtagttctccttgaagaggtccttcacgtcccttgtaagttggattcctaggattttattctctttgaagcaattgtgaatgggagttcactcatgatttggctctctgtttgtctgttattggtgtataagaatgcctgtgatttttgcccattgattttgtatcctgagactttgctgaagttgcctatcagcttaaggagattttgggctgagacaatggggttttctggatatacaatcatgtcgtctgcaaacagggacaatttgacttcctcgtttcctaattgaataccctttatttccttctcctgcctgattgtcctggccagaacttccaacactatgttgagcagaagtggtgagagagggcatccctgtcttgtgccagttttcaaagagaatgcttcaagtttttgcccattcagtatgatattggctgtgggtatatggatattaggtagagtagattttagagagaaaaattacttgtgacaaatgaaaacattatgtaatgataaaaggatcaattcaccagtgggacataacaatcctaaatgagtgcaaaccaaaccacacagcctcaaaatacgtaatacgtaaaacaaaaactagtagagcgggaaagagaaatggagaaacataaaattcgagttatagtccccaatttactccactctcagcatattatagaactaccagacagaatgggacaaatatttgcaaactatgcatccgacaggttaagtcacatgcagaatctacaaggaattcaaacaactcaacaacagcaaaaaaagcaaacccattaaagagtgggcaaattacatgaacagacattttgcaaaggaagacatataaattgcgaataaacatatgaaaagatactcaatatcacaaatcatcagaataatacaaattaaaccacagcgagataccatcttacaccagtcagaatggctattatttaaaagtcaatcaacaacagatattgatgaggatgcacagaaaagggaacaattatacattgcttgttggaatgtaaatttgcacaacttctatggaaaacataaaacagttgactcagcaatcccactactgggtacctaccgaaaggaagagaaatcattgtatcaaaagataactgcacttatacatttagcacagcacaagtcacaatagcagagatatggaatcaacttaagtgtctatcgatggatagtaagagaaataaagtgtggtgtatatatattccatggaatattattcggccttaaaaaaagaatgaaatcatgtcttttgcaaaaacaaggatggaactggagtccattattttaagtgaaatatctcagaaataaagtcaaatatcacatgttctcacttgtaagtaggaattaaataatgtgtacacataaacatagagagtgaaataattcacagtgaagactcagaaaagtggaagagtgggaacagggagagggatgataaatgaccttgtgggtacaatggacactatttgtgatggctacactaaaagcctaggcaaaccactacataatatgctcatgtaacaaaactgcacttgtacccctttcatctctaaaaaaattttttaaagaaaattagcaaggatatagaactcaacaacacaatcaaccaacagtatctatttgacaaatatagaatatttcatccaacaaaagaacaacatacatgtttctccagagttcacagagtattcccaagacaaaccataccctaggcaataaaacaaatctcaaaaactttaaaatttaaaacaattgaggtgaagcagagtgttttttcttaacacaatggaattaaactagaaatcaataacaaaacaagaagaaggtttccaaacacttgcaaattaattagtacacttctaaggagctcatgattcaaagaagaagtctgaaaggaaattttgaaaaataaatataactaaatgaaaaaaacacctgtattaaaacagctaaagcagtgcagagagaataattaataacacttagtaaaaccttacaaaagacagagcaccaaatcagagtaccaataatctaagttcctacttcaagaaactagaaaaaaagagcaaaataaactaaaagcagagaaaggaagaaataataacaggaaaaaaaaaagagaaaatcaactgcagcaacaggctagttcttgaaaaaaaaataaatatacctgaaaaaccatcaggtaagactgatgacaaactacaaaaactaaaccaagatgaaggcaacaaacaaaatagtcctataatttactaagtaaattaaatttggaatatcaaatctctcatgaaattatctccagacccagttggtttcaccagagaattctaccaaacatttaacaaagaattaacaagaatttgtcacaaaaacttccagaaagcaaataaaaggaatacttcctaatttactttatgaagatagtattacccagataacaaaatcaaattaagacaacacaaataaaatattaataaaactaatatttaagtataaaatgtagaaatgtaaattttattttttaaaaaaaggaaaaaatcatcaatattcagagctaagcaaagaattctaagaggtgaaaccacgagcacaatctattttttaaaaaactgataagccgtcctctgtgaagaaccctgtcaagttaagagggtgaaaatacaagttaagaaatgaaagaaaataaatgaaaaccatatatccaacaaaggactagtctctagaatatataaaaactcttgaaacacaactttacaaaaaagaaataatcaaaatataaaatgggcaaaaaatataaatacatatttcaaggaagatattatacagatggcaaataacatgtttattcaatgtcattagccagcatgaaatgaaaattagtaccacaattagttcttactacagcattatcaaaacgactaaaacttaaaaatactgataatacaatattctggtaataatgtggaaatactagaccattcatacactgctggtgggaacaaaattgtacgactactctggaaaattgtttggcatcttcttagaaaattaaatgtgctttcaggattctttctttgcttgactttttaaagtctgattataatgtgtctcaatatgaatccatcttacctggagtttgttgagcatcttggatgcttatattcatttctttcatcaaattcggaaagctttggtcattatttcttcaaatattctctctataactttcttttttctttctgggattcccactatacacatgttggtccacttgatggtgtcccacaggtcccttctgttccattcacttatgttccaccttttctcgttctttagactcaataattttcattgcgctatcttcaagtttgctgattcttctgtctgcttaaatctgtctttgaattgttctggtaatttttttatttaaagtattgtaattttcagctctcaaatttctatttttttgtttgctatttctttatcaatatttccattttgcttatacatcattttcttgactttctccatatcttcctttagttttttcaacatgttatcagaacaggtgtgtctatactaatattagacaaaatgtactttaaatgtaaaaaggttacaagagacaaagaaagtaattacatattaacaaaatgtttcaatacaacaatatttacttatctaatgacagaccatcaaaatataagcaaaaactgacaaaattgaaggaagtagacagttctatgatagtagttgcatacttcaatgtcaaactcacaatattaaataaaacaaccagatagaatataaagagagaatttaacacaataaatcaactaatctaacagacatatacagaacactcgaccaaaccatagcatatacattctaatcaagtgcacatttttcaggacagatcatacgttaggccaataattaagtctcactagatttcaaaaatacagaacatacaaaggatcttctccagccacaatgggatgaagttagaaatcaacagatgtaaaactgcaatagtcacaaatttgaagaaattaaacaatacactgttaaacaaccaattgatcaaagaagaaatatgaagggaaatagaaaatacttaaatacaaatgaaaatgaaaacataccaaaactcgtgggatgcagcaaaaacagtgctaaggccaaaatttttagtttactttttaaaaaagtctcaaacaaataactttataacataaggaactagaaaaagaacaacaaaataaacacacagccatcagaacaaagggtataataaagattagagcagagacaaattaaaaatagagaaacaatagaaaaaatcagtgaaaccaaaagttggttctttggaaagatgaacaaaattcacaaacctttagctagatgaacgaagaaaaaaaagagaagactcaaattactaaagtcagaaatgaaaaatggaatattactactcattatacagaaataaaaaggatgataaggcaatcctataacaattacacatcaaccaactgaagaatctagaagaaatggacaaattcctagaaacacaaaatctaccaacactaaccacagagaaacagaaaatctgaatagacctacaacaataaagaaattgactcagttgtcaaaaaaatctcatctctgatgttggtgaaaaaatgcaaagtttcatttaggagaattagttttagagatctattacacagcatggtgactatagttgataatagtatactgtatacttgaaaattgctaagacagcacattttaaatgctctcactacaaaaaagatacatatttcaggtgctggatatgttaagtagcttgatgtaatcattttgccatgtatacatacatcaaaatatcatattgtaacccataactatatacaaaagacatctcctgacaaagaaaagcccccatggcttcgcagaggaattataacaaacatttaaagaaggattaaaaccaatccttctcaaacttttccaaaatactgaaaatgagggagtacttcctaactcattctgtaaggccaacagtaccctaacaacaaagtcacacaaatacactactagaaaaaaaaagctacaaaacaatatcccttatgaacactggcatgaaattatcagaaaaatactagcaaaccaaatacagcagcatattaaaagaattatacaccatgaccaagtgggatttattcctgagatgcaagaattgttcaacatatgaatattgatcaatgtaatatctaataagagactgaatgggaaaaaacacacaacatctcaattgatgtagaaaaagcatttgacaaaattcaacaccattttataataaaaactctcaacaaataaggaagaaaaggaaactaactcaacacgataaaggctatatgtgaataacccacagcatacatcatacatcatactcagtggtgaaagactgaaaactcttcttttaaaatcaacaataagaaaaggatgcctactttcaccacttctattcaacatggtacttactagaagttctagccagagcaattaggcaaaaaaaaaaaaaaaaaaaaaaggaaagaaagaaatgaaaggcatccaagttggaaagaacgaagtaagtaatctctgtttgcagataatatgatcttacatatgtaaaaccctaaagattccccccaccaaaaaaaaaatcccgttagaactaataaatgaattgagcaaaatagtaggacacaaagtcagcatgcaggagatctcagggtatcagcaagatagcagaatagtagatgccctggcatcacttcccaacacaaaaattcaagaaactattcaaaaatgagaatactatcctgagttcaccagaactctgggtttggaggagaagtggagaaaatatctgcgtccataaaatcaagagaagccattactggtaaaagaaaaagtcattttaggctccatcagcctatcccccaagctggcataatgtcactcacagagactctagacctgtgatttctgagctgaaagaggagaactggaggtgaatctttaacctcttcatgagtctaagagaagagtcttaacaggaagcctactccagtcccatcccatgggaaccactgagagtggagtggctgaatcatccggggtgaactaggaacaaagagcaggatgctgatcacagcaactgacgtgtgaaactcagcagctactctgcactctgatcaccagggatgccacagttaagagactgactggaaggagggttcaaaatggctggccagatgcagctagtaggtgcctcttccattaagaaaaatcaaaatatcaagtaaatatacacactttgaatggattgtctaagagagaacactggaattcaacagagaagtgacaagaatcacagaaagcaaataagaatgaatccaagcagcctactgggctgggataggtgtgaaactgatagaagctccctgatgtggggaaaaggtgagtgagagacccctagggctccacactcctataatagattttttcaattctatctgtagaagagtccctcagtcctcccaggcctccaggataaaagggaactgcctagaaattacacaaaggcattttcgaactcatgtgaagtcccacaggcttttgagccctgagcagctgtagcctagtcccagtctgagagcccaacccccagaggcctgtgtgttaccctgggtctgccatcagtatcactgccccagccacaaggccagagagaaagcagggcactcaaacaccttcacaaggccccaaaaacagataccaccaccactgctgtgggacagagaagtgagcaaactgagcaccccataactgcttgactttgctgatcccactgagagacgcctgccccgatatacatatgccatggcagacccacagtgctgccaccctgcccccatctgagcatctccactgaagccagcaccactctgagaggccagaccccagacgcctgtgttctgcccttagactcctgccatccctgctgcctctgccaccctcaggccagaaagaagcaggcaggtcaggcactttcatatgcctcaaggacagataccactaccactgctgtcagatggaagtgtgagcaaaacatgtgtatcacagctgcctgcctccactgctcaaggcagagaaaggtccagcctcccttggtggcaggtccacagcacagccaccctgcctgagcattctgctgcaggactggggaccagcccactcctccctatcacaggcagcacctgaaccctagggacctgaggacaaatccagcagtccagtccaaccaggactcatgcataccatccaaggggccatctaggggcctggaaattgggggactgcctagcccagtccaccacaactggcacctgatcagtccagggtctaagtcaggccaacccaaccagctgacaacatcacagctggcatgcacttgcacatgccaaaaagtggagccactccccctctatatacaaagcagcagtgttcctgcattggaggccaggaacaccacaaagctgagataagaggttctactccaaagccacttcgacagagagccataggacaggaattttctgcagccctcagttacactgtggcctggaggtagacaaccatgtctgactaaactgagagtcatgagccctgggacaggggtataacagggaaatggattgcattcccacctgcctaggatgtgaagctggtgcagccaactcccctccttcagagagctcagtacatttcaccaggagctctccctgccactcatgtcagtgctgatgtcttctcttgtcaatagggtattcatgggtgagcttggatgtccagttccacccagctttgtccccccacctatggaagctcagcagggaattcctggaaactgggcattctacagaccggcccatcacctgaaacaacagagagcacctcccagtaaacaaagatcaagcccatacccatctgcttctgccacagccactcttacacatagatgctacctacttactagcttgggggttgaactgcacaacacaatacaaaacctgataatggaagtccacagtgttgaggaatgagataagcttcctgagacaaatacaatcctgttattgcagaaggcaattagcctgctcaaatacccaggacatcactactaaaactggcatttaagaaagccactgcacaaaggctatctataaccaaggaactcatacagtaccttgatacctgaaagcacctagaattgaagccaaacaatcatacacaacatacaggacaatcataccttcaaggaggaaaaacaatgtcccatcaaaacaaaactaaactcaaagataagaagtgatggcttcttcagatgagagggaaccagcataagaacactggcaatatgaaaaaacaaagtgttgtaccacctgcaaaggatcacatcagctttctagcaatggatcttattcaaaatgaaaattcaaagataaagaattcaaaatatggatggtatgaaagctcaataagatccaagagacagttgaaaaccaatacaaagtaatcagaaaaaacaattcagaatatgaatcgaaaacttactaaggataattattttttaaaaaagaacttctagaactaaaaattcattaaaggaaccacaatatagagatcaaagccctaataataggctagaacaaacaaaaacaacttcagagctagaaaacagagctttttaattaacccagttagacaaaaaaaattaaagaataaaaatgagcagagcctttgagaaacatgggattatttaaacttactaagctatgagttatcattgtttcagaagaagatgtaaaaagtattaaaaaaattgagggaataatttaggaaaacttccctggttttgctagagatttgacattcacatacaagaaagtcagaaaactcctggaagatacattgcaagacaaacttcaccatggcatatactcatcagaagatccaaagttaacatgaaagagaaagtcctaaaagtggaaagaaagaaggggctaatcagctatgaaggaaataccatcagactgacagtggacttctcagcagaaaccttacaaacaagaagatgctgggttcctattttcagtctctttgaagaaaaaaaaaatctagcaaaggattttgtatcctgctaaattaagcttcattaatgaaaataaaataaaatatttcctagacaagaaacggctaagggaattcatcactactagaccagctatacaagaaattttcaatggagttcaaaacgtggaaatgaatgggcaatgccatcataaaaacacaggaatataaaaaacttatagaacttataaaacaattacacaaccaagattgcaaaccatctaagtaacaattaacattatgacagggacaaaaacctcacatatgaatattaaccttgaatgtaaatgaactaaatgcctaacttgaaagatatagattggcagaatgaattttaaaaaagaagatccaatgatagcttcttataagaaacccacctaactcataaagatatttaaagactcaaagtcaaaaagtagaaacagatattttatgcaaatggaaaccaaaaatgagcaggaatagctatacttacaccagataaaatagattttaaatcaacaacagttaaaaaaaaaaaaagcaggacattatatggtgataaagtgataaattcaacaagaaaatataacaattctatatacatagagcacccatattcataaaacaaacactaccagaactaagagataaatagcaaaacaataatagtgggggatttcaacaccccactgacagcattaaacagatcattgaggcagaaaaatcaacaaagaaagtctttacttaaattggtctctagactaaatagaacagatagaaatttacaaaacattctagccaacaaccacacaatatatattctcctgttctgcacatgaaacatcccccaaaatataccatatgtcaggccacaaaacaagtgtcaataaaacttttaaattgaaatcaagtatttttttcagactacagtggaattaaaactggaaatcaacaccaacagaaactatcaaaaagatacaaatatgtggaaattgaacaacctgctcctgaaagattgttgcatcaataatgaaattaggctaggaatttaaatttttttgaaacaaatgaaaacagaaacacaacatactaaaacatacaggatacagcaaaagaaatgctaagagggaagcttatagtgttaaatgcctaccttaaaaagataataagatctccaactgacaatctacagtcacacctcaagaacaagaacaaagccaaaggtagcagaacaaaagaaacaacaaagatcagagcagaactaaatgaaactgagaccaaacaaaaatacaaaggatcggagctggcagtcaagatggccaaatatgaacagctccagtctacagctcccagtgtgagcgacgcagaagatgggtgatttctgcatttccatcggaggtaccgggttcatctcactagggagtgccagacagtgggtgcaggacagtgggtgcagtgcactgtgcgtgagccaaagcagggtgaggcattgcttcactcgggaagcacaaggggtcagggagttccctttcctagtcaaagaaaggggtgacagacggcacctggaaaattgggtcacgcccaccctaatactgcgcttttccgacaggcttaaaaaacggtgcaccagaagattatatcccacacctggctcggagggtcctatgcccacggagtattgctgattgctagcacagcagtctgagatcaaactgcaaggcggcagtgaggctgggggaggggcacctgccattgcccaggcttgcttaggtaaacaaagcagccgggaagctccaactgggggaagcccaccacagctcaaggaggcctgcctgcctctgtaggctccacctctggtggcaaggcacagacaaacaaaaagacagcagtaacctctgcagacttaaatgtccctgtctgacagctttgaagagagcagtggttctccgagcatgcagctggagatctgagaacgggcagactgcctcctcaagtgggtccctgacccctgacccccaagcagcataactgggaggcaccccccagtaagggcagactgacacctcacacggctgggtactcctctgagacaaaacttccagaggaacgatcagacagcagcattcgcggttcacgaaaatctgctgttctgcagccaccgctgctgataccgaggcaaacagggtctggagtggacctctagcaaactccaacagacctgcagctgagggtcccatctgttagaaggaaaactaacaaacagaaaggatatacacaccaaaacccatctgtacatcaccatcatcaaagaccaaaagtagataaaaccacaaagatggggaaaaatcagagcagaaaaactggaaactctaaaaagcagagtgcctctcatcctccaaaggaatgcagttcctcaccagcaacagaacaaacctggatggagaatgactttgacgagttgagagaagaaggcttcagacgatcaaactactccgagctacaggaggaaattcaaaccaaaggcaaagaagttaaaaaccttgaaaaaaatttagacaaatgtataactagaataaccaatacagagaagtgcttaaaggagctgatggagctgaaagccaaggcttgagaactacgtgaagaatgcagaagcctcaagagctgatgcgaacaactggaagaaagggtatcagcaaaggaagatgaaatgaatgaaatgtagtgagaagggaagtttagagaaaaaagaataaaaagaaacgaacaaagcctccaagaaatatgggactaggtgaaaagacggaatctacatctgattggtgtatctgaaagtgacagggagaatggaaccaagttggaaaacactctgcaggatattatccaggagaatttccccaatctagcaaggcaggccaacattcacattcaggaaatacagagaatgccacaaagatcctccttgagaagagcaactccaagacacataattgtcatattcaccaaagttgaaatgaaggaaaaaatgttaagggcagccagagacaaaggtcgggttacccacaaagggaagcccatcagactaacagcagatctcttggcagaaaatctgcaagccagaagagagtgggggccaatattcaacattcttaaagaaaagaattttcaacccagaatttcatatccagccaaactaagcttcataaatgaaggagaaataaaatacttcacagacaagcaaatgctgagagattttgtcaccaccaggcctgccctaaaagagctcctgaaggaagcactaaacatggaaagaaacaactggtaccagccactgcaaaatcatgccaaattgtaaagaccatcgaggctaggaagaaactgcctcaactaaggagcaaaataaccagctaacatcataatgacaggatcaaattcacacataacaatattaactttcaatgtaaaaggactaaatgctacaattaaaagacacagactgccaaattggataaacagtcaagacccatcagtgtgctgtattcaggaaacccatctcacgtgcagagacagatataggctcaaaataaagggatgaaggaagatctacaagcaaatggaaaacaaaaaaaggcaggggttgcaatcctactctctgacaaaacagactttaaaccaacaaagatcaaaagggacaaagaaggccattacataatggtaaagggatcaattcaacaagaagagctaactatcctaaatatatatgcacccaatacaggagcacccagattcatgaagcaagtccttactgacctacaaagagacttagactcccacacaatattaatgggagactttaacaccccactgtcaacattagacagatcaatgagacagaaaggtaacaaggataaccaggaattgaactcagctctgcaccaagtggacctaatagacatctacagaactctccaccccaaatcaacagaatatacatatttttcagcaccacaccacacctattccaaaattgaccacatagttggaagtaaagctctcctcagcaaatgtaaaagaacagaaattataacaaactgtctctcagaccacagtgcaatcaaactaaaactcagggttaagaaactcactcaaaaccgctcaactacatggaaactgaacaacctgctcctgaatgactactgggtacataacgaaatgaaggcaggaataaagatgttctttgaaaccagtgagaacaaagacacaacataccagaaacactgggacacattcaaagcagtgtgtagaggaaaatttatagcactaaatgcccacaagagaaagcaggaaagatccaaaattgacaccctaacatcacaattaaaagaactagaaaagcaagagcaaacacattcaaaagctagcagaaggcaagaaataactaaaatcagagcagaactgaaggagatagagacataaaaaacccttcaaaaaattaatgaacccaggagctgattttttgaaatgatcaacaaaattgatacactgctagcaagactactaaagaagaaaagagagaagaatcaaatagacacaatgaaaaatgatagaggggatatcaccaccaatcccacagaaatacaaactactatcagagaatactacaaacacctctacacaaataaactagaaaatctaggaaaaatggataaattcctggacacatacaccctcccaagactaaaccaggaagaagttgaatctctgaatagactaataacaggctctgaaactgtggcaataatcaatagcttaccaaccaaaaagagtccaggaccagatggattcacagccgaattctacccgaggtacaagaggagctggtaccattccttctgaaactattccaatcaatagaaaaagaggaaaacctccctaactcattttatgaggccagcatcatcctgataccaaagcctgacagagacacaacaaaaaaaagagaattttagaccaatatccttgatgaacattgatgcaaaaatcctcaataaaatactggcaaacagaatccagcagcacatcaaaaagcttatccaccatgatcaagtgggcttcatccctgggatgcaaggctggttcaatatacacaaatcaataaatgtaatccagcatataaacagaaccaaagacaaaaaccacatgattatctcaatagatgcagaaaaggcctttgacaaaattcaacaactcttcatgctaaaaactctcaataaattaggtattgatgggacgtatctcaaaataataagagctatctatgacaaacctacagccaatatcgtactgaatgggcaaaaactggaagcattccctttgaaaactggcacaagacagggatgccctctctcaccactcctattcaacatagcgttggaagttctggccagggcaatcaggcaggagaaggaaataaagggtattcaattaggaaaagaggaagtcaaattgtctctgtttgcagatgacatgaattgttatctagaaaaccccattgtctcagcccaaaatctccttaagctgataagcaacttcagcaaagtctcaggatacaaaatcaatgtgcaaaaatcacaagcattcttatacaccaataacagacaaacaaagagccaaatcatgagtgaactcccattcacaattgctacaaagagaataaaacacctaggaatccaacttacaagggacgtgaaggacctcttcaaggagaactacaaaccactgctcaaggaaataaaagaggatacaaccaaatggaagaatattccatgctcatgagtaggaagaagcaatatcgtgaaaatggccacactgcccaaggtaatttatagattcaatgccatccccatcaaactaccaatgactttcttcacagaattggaaaaaactactttaaagttcatacggaaccaaaaaagagcccgcatcgccaagtcaatcctaagccaaaagaacaaagctggaggcatcacgctacccgacttcaaactatactacaaggctaaagtaaccaaaacagcatggtactggtaccaaaacagagatatagatcaatggaacagaacagagccctcagaaataacaccgcatatctacaactatctgatctttgacaaacctgacaaaaacaagaaatggggaaaggattccctatttaataaatggtgctgggaaaactggctagccatatgtagaaagctgaaactggatctcttccttacaccttatacaaaaattaattcaagatggattaaagacttaaacgtcagacctaaaaccataaaaaccctagaagaaaacctacgcattaacattcaggacataggcatgtgcaaggacttcatctctaaaacaccaaaagcaatggcagcaaaagccaaagttgacaaatgggatctaattaaactaaagagcttctgcacagcaaaagaaaataccatcagagtgaacaggcaacctagagcatgggagaatatttttgcaacctactcatctgacaaagggctaatatccagaatctacaatgaactcaaacaaatttacaagaaaaaaacaaacaaccccatcaaaaagtgggcgaaggacatgaacagacacttctcaaaagaagacatttatgcagccaaaagacacatgaaaaagtgctcatcatcactggccatcagagaaatgcaaatcaaaaccacaatgagataccatctcacaccagttagaatggcaatcattaaaaagtcaggaaacaacaggtgctagagaggatgtggagaaataggaacacttttacactgttggtgggactgtaaactagttcaaccattgtggaagttagtgtggtgattcctcagggatctagaactagaaataccatttgacccagccatcccattactcggtatatacccaaaggactataaatcatgctgctataaagacacatgcacacgtatgtttattgcggcactattcataatagcaaagacttggaaccaacccaaatgtccaacaatgattgactggattaagaaaatgtggcatatatacaccatggaatactatgcagccataaaaaggatgagttcatgtcctttgtagggaatggatgaaattggaaatcatcattctcagtaaactatcgcaagaacaaaaaaccaaacaccgcatgttctcactcataggtgggaattgaacaatgagaacacatggacacaggaaggggaacatcacactctggggactgttgtggggtggggggatgggggagggatagcattaggagatttacctaatgctaaatgacaagttaatgggtgcagcacaccagaatggcacaagtatacatatgtaactaacctgcacattgtgcacatgtaccctaaaactaaagtataataaaaaaatataaagaatcaaagaaatgaaaagttagtattctgaaaatattttagaaaatgatagactgctagctagattaaccaagaataaaaaagagaagattcaaataagcataattagaaatggcaatttctgacattacaactgacattatagaaatgcaaaaaaaaatcaccagagaccattatgagcacctctacactctcaaactaaaaaccaagaggaagtgaataaactcttgaaaacatataactgcccgagattgaactaggatgaaatagaaatcaagaaaataccaataatgagcagtaaagtcaatcagtaatttaagaatctcctacgaaaataaaagcctaggaccagacaaattcacagctgaattataccacatttacaaaaaagaacttatggtggttctactaaagttatgccaaaatatcgagaagggaatcctacataactcattctaggaaaccagtatcattttgataccaaagccaggcagggacacacaacaaaaaggaaaactatagatcaatatctctgatgaacagagttgcaaaaactcctcaacaaaatagtagcaaaccaaattcaacagcacatcaagaagataatacaccacaatagagtgagttttattccagaattgcaaggacgattcaacatatgcaaatcaataaatttgattcaccacataaactgaattaaaaacataaaaactacctgataatctcaatagatgaagaaaaagcattagataatatccaggaccccttcatgataacaattctcaacaaactaggcatacaaggagcatatctcaaaattataaaagctgtatacaacaaatccacagccaacatcatactcaatgaggtagagttgaaagcattccccctaacaactggaaaagacaagaatgccagcttccagcactcctattcaacatagtactggaagtcccagctagagtaacaaaagagagaaagaaataagaggcatgcaaactggaaaagagaaagtcaaattatctctgttcactgatgacatattcttatatctacaaaaccctaaatgctcctccaaaagactcctagatttgatagatgaattcagtaaagtttcagaatataaaaatcattgtataaaaatcaaaaccatttatatacaccaataatgatgaagctgagaagcaaatcaagaattcaatcggatttgcaatggctagaaaaatgtatatctagaaatacatttaaccaaggaggtgaaagatctctacaaggagaactacaaaacaacaatgaaagaaatcatagatgacacaaataatggaaaaacatccatgcttatagattggaagaatcaatatcattaaaatgaccatactgcccaaatcaatgtacatattcaatgcaattcctatcaaattaccaatgccaacatcattccccatagaataagaataattgtaaaattcatataaaccaaaaaaatgtcccaatagccaaagaaattctaagcaaaaagaataaagctagagacatcacattccccgtttgtcacagtaggtcacagcactggccacaatagcaaagtcatggaatcaatctaagtgctcatcaatgaatgatatgaagggttggttaaaaaacagtcatatacacttctgtgtgtgtgtgcatgcatgtgtgcgcatggatattataatagtatattataccagtattccatggcacagacatatatatatatgtgtgtatatatatatatacatacacatatatacacatatataaaatgtgatatatatatacacacatatatgtgtgtgtacatatatgtattattccatggtgcttatatatgtgtgtatatagatgaatgtatatgtgtgtgtgtgtgtgtgtgtgtgtatgtatgcatgtgccatggaatactactcagccataaaaagaataaagtcgtgtattttgcagcaatatggatggaactggaggccactatcctaagatgtgaaatgactcagaaatagaaagaaatagaaagtcaaaaaccacatgttctcactaaccacatgtttagcagaagctaaacagtgggtacacatagacacacagagttgaataatagacattggaggctccaaaaggtgggatggagttaaggagttggggggggtgcgggtgaaggataaaatagtacctactgagtacaatgtacactacttgggtgacgggtacaaaatcctcaatttctccactactcaatatatccatgtaacaaaattgcacttgaaaaatttacaaaaaaattttcttaaataaataaaattgtaaaagcaactgactggtaccataaggctgcagagaacgcaatctgcaggaaggcccaaatttctaaccagatttttcccaatgcccagatgctcaatctggaacctcccccctacagagaaataactaaaatgtcagaattaagtcctagtttctgcttaagtcttccccagactgggaaacaatggcagggctacaatacagttctggggcaatgtctaacatttggtgctcactgtaagtgttccccagttcaggaaacaacagggcagggttttaattccagagcagcatttaagttctgttgttcactgtaagtcttccccagaccagacaacaatggaagagcaataagttagttccagtgaattgttttagttcctgtgctcaatataagttcccctagaatggaaaaaaacagcaggccagtgttcaggagacacgaagaaaaagacctggaaagcacatgtaaaaaaaataataataatggtttaaaaattccaaaatctagagaaagaagacatcgtccaggtataggaagttcaggggccacccatcaaattcaacccaaaggagaaatctctaaggcatatcataatcagtgaaatgaaaagacaggatactcaaagcaacaaaagaaaagaaacatcatattgaacagcatcctgaatacagattgcagcagatttctcagcagaaatcctgctgtccagatgataatgggatgttatattgaaaaagagatgggaaaaattgccatccaaaaatactgtacccagcaaaagtatcatttaaacacattcaaagattcccaaacaaacagaagctgagagaattcatcaaaatgtgacctgtcttacaagaaatactaaaagctattcaatctaaaataaatgggcactagtgtataataagaaaacatttgaaggtgtaaaattcactgataaaagaaaaaaagactaattcagaatattctaaaactgtaatttgaataagtaagccatttacatcttgagtatgaaggctaaaagacaaaaacctattaaaatcaataattactacaataactggttaagaaacagataatataaaaagacgtaaactgaaacaccaataaatcaaattattgggggggtgttaaagggtagggtttggttttcttataatacttttcttctctatgcaataaaagttaagtcataatcagttttaaatgacctgattttttggaagcctcatagtaaccacaatgcaaaaacctgtaatagactaaaaataagtagcacaaaatcaaaacatactaccagagaaattcacttaaccacaaaggaaaacagtaacagaggaaaacagaaagaaagtatctacaaaacaaccagaaaacaagtaataaaatgtaaacagaaaataatcttgaaggtaagtggacaaaagtcttcaattaaaagagtgcaagccacatgtagaaaaataaaactggatctccatctctcactttacacaaaaatcaagtcaatatagataaaagacttaaatataagacctgaaacgataaaaattctacaagataactttggaaaaactcctcaagacattgacttaggcaagaattcatgcctaagactccaaaagcaaatacaacaaaaccaaaaataaatgggacctaattaaactaaaaagctctgtagagcaaaagaaataatcagcaaacagacaacccacagagtgaaagaaaatcttcacaaactatccagccaacaaaggactagtatccagaatctacaaggaactcaaacaaattaacaagaaaaaaaaaaaaaaacacaaataatcccatcgaaaaatgagcaaaggacatgaatagataattctcaaaaaagatacacaaccaaccaacaaacatatgaaaaaacactcaacatcactaattatcagggaaatgcaaattaaaaccatgatgagattacaccttactcctgcaagcatggctataaattaaaagttaaaaaaaaaaatagatgttggcatggatgtggtaaaaagggaacacttttacactgctgataggaatgtaaattagtacaaacactatggaaaacagtatagacgttccttaaagaaccacaagtaaaattaccatttgatctagcaatcccactactgagtatctacccaaaggaaaataagtcattatatgaaaaagatgcatgcacacacgtttatggtggcacaattcacaattgcaaagatatggaactaacctaagtgtctatcaaccaacaagtagataaagaaaaaatggcatatatacaaatgctactcagccataaaaaggaatgacataatgcctcttgcaggaacttagatggagcgggaggccattattctaagtgaagtaactcaggaataaagaatcaaatatcatatgttttaagtgagagctaagctatgaggatgcaaaggcataagagtgatataatggactttggatactcagaacgggggagggataaaagactatatattgggtatagtatacaatgctcaggtaacaggtgcactaaaatatcagaaatcaccactaaaaaacttatctatgtaaccagaaacaatctgtacccccaaagcttttgaaatttattttaaaaattaaaatgcagggtggctgaatggatttttaaaacatccaactatatactgtctacaagaaactctatttaccagtatagacatgcacaaactgaaagtgaagggatgaataagatattacatgcaaatggaagccaacatacagcagcagtagctatacttatatcagacaaaataaaatttagtcaagaatgataaaaaaagatacagaaggtcattatatgatgatgaaggggtcaatacaataacaggatattacagttataaagatatatgcagtcaacaccagagcacccaaatataaaagacaaatattaacagacctaaagagagagactgactgtgacacaataacagtagaaaaccacagcactccatgttcagcattagacagatcatctgaacagaaaatcaactaagaaacatcagagctaaactgaactcttgaccaaatggaccaaacagacatttatagaacattgcatccaatagccgcagaatacacatttttctcaacagcacatgcaacattctctaggacagaccatatgttaggtcacgaaacaaatcttaataaatttttagaagtcaaaactattaaataacttttctgaccataatgggataaaattagaagtaaaccacagaaggaatatcagaaactgtacaaaatcataattattaagcaacatattcctaaacaatgaatggtttaatgaagaagtttaaaagaaaattgaaaattttcttgagacaaattaaaatggaaacacaacatactaaaacctatgaaatacagcaaaagcagttctaagaagaaagttgtttatagcaataaaaagcctacatcataaaaattagaaagacttcaaatgaacagcctaacactgcacctcaagaaatggaaagcaagaaaaattcaaacccaaaattagtagaaggaaagaaataataaacattagagtataaagatataaaattgagactaaacaaatatcaacaaaataaaaatgatgttttgaaaaaataaacgaaattgaaaacctttagctagagtaagaacaaaagagagacctaaaaatcccagcccaggcttgctaggccaagcagcttagcgctactctagaaaatcacacaactgaagatggccgaataggaacaactccagtctgcagctcccagtgtgattgacacagaagatgggtgatttctgcatttccaactgaggtacctgcttaatctcactgggactggttggacagtgggtgcagcccacggagggtgagctgaagcagggtgatgcattgtctcacccaggaagtgcaaggggaggggaaatttccctttcctagccaagggaagcggtgacagactacatggaaaaacaggacactccccgaccaaatactgcacttttcccaaggtcttaaaaaccggcagacaaggcgattctctctcgtgcctggctcagtgggtcccacacccactgagccttgctcactgctagcacagcagtctgaggttgatctgccaagcggcagcctggctaggggaagggcgtccaccattgctgaagcttgagtaggtaaacaaagcaaccaggaagctagaattgggcagagcccactgcagctcaacaagctctactgcctctagaatccaactctctgggcagggtatagctgaacaaaaggcagcagacaacttctgcagacttaaacgcccctgtctgatagctctgaagagagcagtgattctcccagcacagcatttgagctctgagaacggacacactgcctcctcaagtgggtccctgacccccttgtagcctaagtggaacacacctcccagtaggggccaacacctcatatagacagctgccactctgggatgaagcttccagaggaaggatcaggcagcaatatttgctgttctgcaatatttgctgttctgcagcctccaatggtgatacccaggcaaacaggacctggagaggaattccagcaaactccaaaagacctgcagttgagggacctgactgttagaaggaaaactaacaaacagaaaggaatagcatcaacatcaacaaaaaggtcatctacaccaaaaccccatctctaggtcaccagcattaaataccaaaggtagataaagccacaaagatggggagaaaccagagcagaaaagctgaaaattctaaaaatcaaactgccacttcccctccaaaggatcacagctcctcgccagcaacggaacaaagctggacggagaatgactttgacaagttgacagaagtaggcttcggaaggtcagtaataacaaacttctccgagctaaaggaggatgtttgaacccattgcaaggaagctaaaaaccttgacaaaagataagatgaatggctaactagaataaacagtgtatagaagaccttaaatgacctgatggagctgaaaaccatggcacaagaactttgtgacgcatgcacaagcttcaaaagctgattcgatcaagtggaagaaagggtatcagtgatggaagatcaaaataatgaaataaagtcacaggagaagtttagagaaaaaaaagagtgaaaagaaacgaacaaagcctttaagaaatatgggactatgtgaagagaccaattctacatttgattggtgtatctgaaagtgatggggagaatggcaccaagttggaaaacactcttcaggttattatccaggagaatttccccaacctagcaagacaagccaacactcaatttcaggaaataaagagaagatcataaagatactctttgagaagagcaaccccaagacacataactgtcagattcaacaaggttgaaatgaaggaaaaaatgttaagggcagccagagagaaaggtcaagttacccacaaagggaagcccatcagactaacaacagatctctcagcagaaagcctacaagccagaagagagtgggggccaatatccaacattcttacagaaaagaattttcaatggagaatatcatatccagccaaactaggcttcataaatgaaggagaattaaaattctttacagacaagcaaatgctcagaaattttgtcacaccaggcctgccttaaaagagctcctcaaggaagcactaaacatagaaagaaacaaccagtatcagccactgcaaaaacaggccaaattataaagaccatcgatgctatgaagaaactgcatcaattagctgacaaaacaaccagtgaacatcatgacagaatcaaattcacagataacagtattaaccttaaatgtaaatgggctaaatgccccaattaaaagacacagactggcaaattggataaacagtcaacacccatcagtgtgctgtattcaggaaacccatctcatatgcaaagacacacataggctcaaaataaagagatggaggaagatctaccaagcaaatggaaaacaaacaagcaaaaaaaaccaggggttgcaatcctagtctctaataaaacagactttaaaccaacaaagatcaaaagagacaaagaaggccattacataatggtaaagggatcaattcaacaagaagagctaactactgtaaatatatatgcacccaaaacaggagcacccagattcatacagcaagtccttagagacatacaaagagacttagactcccacacaataataatgggagattttaacaccccactgtcaaaattagacagatcaatgagacagaaggttaacaaggatgtccaggacctgaactcagatctgcaacaagcagacctaatagacatctacagaactctccaccccaaatcaacagaatatacattcttttcagcaccacatcacacttgtttcaaaattggccacataattggaactaaagcactcctcagcaattgtaaaagaacagaaattacaacaaactgtctctcagaccacagtgcaatcaaattagaactcaggattaagaaattcactcaaaaccgcacaaccacatggaactgaacaacttgctcctgactgactactgggtaaataacgaaatgaaggcagaaataaagatgttctttgaaaccaatgagaacaaagacacaacataccagaatctctgggacacatttaagcagtgtatagagggtatgtatagcactaaaagcccacaagagaaggaaggaaagatctaaaatcgacaccttaacatcacacttaatataactagagaagcaagagcaaacaaattcaaaagctagcagaaggcaagaaataactaagatcagagcagaactgaaggagatagagacacaaaaaacccttcaaaacatcaatgaatccaggagctgcttttttggaaaagatcaacaaaattgatagaccactagcaagactaataaagaagaaaagagagaagaatcaaatacatgcaataaaaaatgataaaaagaatatcaccaccgatcctgcagaaatacaaactaccatcagaaaatactgtaaacaactctatgcaaataaactagaaaatctagaagaaatggataaattcctcgacacatacaccctcgcaacactaagccaggaagaagtcgaatctctgaatagaccaataacaggatctgaaattgaggcaataattaatagcctaccaaccaaaaacaatccaggaccagacggattcaaagcagaatactaccagaggtactaagaggagctggtatcattccttctgaaagtatttcaatcaatagaaaaagaggaaatcctcccaaattcattttatgaggccaatattatcccgatacaaaagcctggcagggacacaacaataaaagagaattttagaccactatccctgatgaatattgctgcaaaaatcctcaataaaatactggcaaaacaaatccagcagcacatcaaaaagcttatccaccatgatcaagtcagcttcatccctgggatgcaagactggttcaacatatgcaaatcaataaacataatccatcaaataaacagaacaaatgacaaaaaccacatgattatctcaatagatgcaaaaaagacctttgacaaaactcaacaccctttcatgctaaaaactctcaataaactaggtattgatggcacatatctcaaaataataagagctatttatgacatactgccaatatcatactgaatgggcaaaaactggaagcattccctttgaaaactggtacaagacagagatgccctttctcactattcctattcaacataatgttggaagttctggccagggcaatcaaacaagagaaagaaataaagggcattcaattgggaaaagaggaagtcaaattgtccctgtttgcagatgacatgattgtatatttagaaaaccccattgcctcagcccaaaatctccttaagctgataagcaacttcagcaaagtctcaggatacaaaataaatctgcaaaaatcaaaagcattcttatacaccattaacagacaaacagagagccaaatcatgagtgaactcccatttacaacggctacaaagagaataaaatacctaggaatccaactaacaagggatgtgaaggacttcttgaagaagaactacaaaccactgctcaatgaaataaaagaggacacaaacaaatggaagaatattccatgctcatggataggaagaatcaatatagtgaaaatggctatactgcccaaggtaatttatagattcaatgccatccccatcaagctaccaatgactttcttcacagaattggaaaaactatttaaagttcatatggaaccaaaaaagggcctgcattgccaagacaattctaagcaaaatgaacaaagctggagccatcatgctacctgacttcaaactatactacaaggctacagtaagcaaaacagcatggtactggtaccaaaacagagatatagatcaatggaacagaacagagccctcagaaataatgccacacatctacaaccatctgatctttgacaaatctgacaaaaacacgaaatggggaaaggattccctatttaataaatgatgctgggaaaactggctagccatatgtagaaagctgaaactggatctcttccttacaccttacacaaaaattaattcaagatggattaaagaattacatgtgagacctaaaaccataaaaaccctagaagaaaacctaggcaataccattcaggatataggcatgggcaaggaattcatgactaaaacaccaaaagcaatggcaacaaaagccaaaattgacaaatgggatctaattaaactaaagagcttctacacagcaaaagaaactaccatcagaatgaacaggcaacctatagaatggaagaaaaattttgcaatctacctatctgacaaagggctaatatccagaatctacaaagaactcaaacaaaaatttaccagaaaaaaacaaacaaccccatcgaaaagtgggcaaatgatatgaacagacacttctcaaaagaagacatttacgcagccaaaagacacatgaaaaaatgctcatcatcactggtcatcagagaaatgaaattcaaacccacaatgagataccatctcatgccagttggaatggcaatcattaaaaagtcaggaaacaacagatgttggggaggatgtggagaaataggaatgcatttacactgttggtgggagtgtaaactagttcaactattgtggaagacagtgtggcgattcctcaaggatctagaactacaagtaccttttgacccagccatcccattactgggtatagacccaaaggattatcaatcatactactataaagacacatgcacacgtatgtttatggtggcactattcacaacagcaaagacttggaagcatcccaaatgtccatcaatgatagactggattaagaaaatatggcacatatacaccatggaatactatgtagccataaaaaaggatgagttctagcccttcgcagggacatggatgaagctggaaaccagcattctcagcaaactatcgcaaggacagaaaaccaaacactgcgtgttctcacttatagaggggaattgaacaatgagatcactcacacacggggcggggaacatcacacactggggcctcgttgggggacgagggctgggggagggatagcattaggagaaatacctaatgtaaatgatgagttgatgggtgcagctacaaacatggtacacgtatacctatgtatcaaacctgcacgttgtgcacgtgtaccctagaacttaaagtataattaaaaaaaaaaaacaaaaaaagaaagactaaagtatagcctctaattgacctcagtgaacaaagagatgtatcacgggggaaaaaaaaaactaaataaaatcaaaaactaaaaaggagatattatatttcataccacagaaatacaaaggctcattagaaactattacgaacaactatgcaccaacaaattttaaaacttcaaagaaattgataaatttctagacatatacaacctaccaagattgaaatatgaagaaatagatatcctgaacagatcaaaaatgagtaataagatttaaacagtaatttaaaaaaaatctttcaccaaagaaaatcccaagacctgatagtatcatggctgaattccttttttttttattatactttaagttttagggtacatgtgcacaacgtgcaggtttgttacatatgtatacatgtgccatgctggtgtgctgcacccattaactcgtcatttacattacgtatatctcctaatgctatccctcccccctgcccccaccccacaacaggccccagggtgtgatgttccccttcctgtgtccaagtgttctcattgttcaattcccacctatgagtgagaacacgcggtatttggtttttctgtccttgccatagtttgctgagaatgatggtttccaacttcatccatgtccctacaaaggacatgaactcatccttctttatggcagcatagtattccatggtgtatatgtgtcatattttcttaatccagtctatcattgatggacatttgggttggttccaagtctttgctattatgaatagtgccacaataaacatacgtgtgcatgtgtttttataccagcatgatttatactcctttcggtatataccccgtaatgggatggctgggtcaaatggtatttctagttctagatccctgaggaatcgccacactgacttccacaatggttgaactagtttacagtcccaccaacagtgtaaaagtgttcctatttctccacatcctctccagcacctgttgtttcctgactttttaatgattgccattctaactggcatgagatggtatctcattgtggttttgatttgcatttctctgttgcccagtgatgatgagcatttttttcatgtatctttgggctgcataaatgtcttcttttgagaagtgtctgttcatatcatttgcccacttttcgatggggttgtttgtttttttctggtaaatttttgtttgagttctttgtagattctggatattagccctttgtcagataggtagattgcaaaaattttcttccattctataggttgcctgttcattctgatggtagtttcttttgctgtgtagaagctctttagtttaattagatcccatttgtcaattttggcttttgttgccattgcttttggtgttttagtcatgaagtccttgcccatgcctatgtcctgaatggtattgcctaggttttcttctagggtttttatggttttaggtctaacatttaattctttaatccatcttgaattaatttttgtataaggtgtaaggaagggatccagtttcagctttctacatatggctagccagttttcccaccagcatcatttataaaatagggaatcctttccccctttcttgtttttgtcagatttgtcaaagatcagatggttgtagatgtgtggcattatttctgaggcctctgttctgttccattggtctatatctctgttttggtaccagtaccatgctgttttgcttactgtagccttgtagtatagtttgaagtcaggtagcatgatgcctccagctttgttctgttggcttaggattgacttggcaatgtgggatcttttttggttccatatgaactttaaagtagttttttccagttctgtgaagaaagtcattggtagcttgatggggatggcattgaatctataaattaccttgagcagtatggccagtttcaagacattgattcttcctaaccatgagcatggaatgttcttccatttgtttgtatcctctttaagttcattgagcagtggtttgtagttctccttgaagaggtccttcacgtcccttgtaagttggattcctaggtattttattctctttgaagcaattgtgaatgggagttcactcatgatttggctctctgtctgtttttggtgtataagaatgcttgtgatttttgcacattgattttgtatcctgagactttgctgaagttgcttatcagcttatggagattttgggctgagatgatggggatttctagatatacaatcatgtcacctgcaaacagggacaatttgaattcctcttttcctaattgaatactctttatttccttctcctgcctaattgccctggccagaacttccaacactatgttgaataggagtggtgagagagggcatccctgtcttgtgccagttttcaaagggaatgcttccagtttttgcccattcagtataatattggctgtgggtttgtcatagatagctcttattatttagagatacgtcccatcaatacctaatttattgagagtttttagcatgaagggctgttgaattttgtcaaaggccttttctgcatctattgagataatcatgtggtttttgtctttggttctgtttatatgctggattacatttattgatttgcatatgttgaaccagacttgcatcccagggatgaagcccacttgatcatggtggataagctttttgatatgttgctggattcggtttgtattatattgaggatttttgcattgatcttcatcagggatactggtctaaaattctatttttttgttgtgtctctgtcagcctttggtatcaggatgatgctggcctgataaaatgagttagggaggattccctctttttctattgattggaatagtttcagaaggaatggtaccagctcctccttgtacctctggtagaattcggctgtgaatccatctggtcctggactttttttggttggtaagctattaattattgcctcaatttcagatcctgttattggtgtattcagagattcaatttcttcctggtttagtcttgggagggtgtatgtgtccaggaatttatccatttcttctagattttctagtttatttgcatagagttgtttatagtattctgtgatggtagtttgtatttctgcaggatcggtggtgatatcccctttatcactttttattgtgtctatttgactcttctcccttttcttctttattagtcttgctagcggtctatcaattttgttgatcttttcaaaaaaccagctcctggattcgttgattttttgaaaggttttttgtgtctctatgtccttcagttctgctctgatcttagttatttcttgtctctgctagcttttgaatgtatttactcttgcttctctagttcttttaattgtgatgttaaggcatcaattttagatctttcctgctttctcttgtgggcatttagtgctataaatttccctctacacactgctttaaatgtgtcccagagatcctggtatgttgtatctttgttctcgttggtttcaaagaacatctttattgctaccttcatttcgttatgtactcagtagtaattcagaagtctaccaaacatttaaagaactaatactacttctactcaaactcttaagaaaaaaattgaaaagcagggaatactttcaatctcatctatgaggccggcattatcctaataccaaaaccaacaaagacagaacaaaaaagaacactacaagccaatatcctcgataaacctagatgcaaaaatcctcaacaaaatactcacaaatcaatttcaacaagacaacatattttttaaaaatcacttatcattatcaagtgggaatcatctcaggaattcatgaatggttcagcatatgcaaatcaataaatatcatatatcacagtaacataatcaataacaaaaactatccgatcatttcaataagtgctgaaaattcatctaatttcaaatttcacactatctggtttccaatctacaaagctacagtaaataaaaacagtgtagtagtaacatagaaacatacctatagatcagtggaatagaataggagagcccacaaacaaaccctaacatgtatgatcaaataattttttgacaagggtgccagtaccattcaatggataagacagtcttgtcaacaaatggttctgggaaaatgggatatccacatgccaaatagtgagattagacccttttactatatacaaaaattcactcagaaatggataaaaggcccaaatgtaaaacctaaaactataaaactcttagaagaaaacagggtaaaagcttcattccattggatttggtaaagatttcttacatatgacaccaaagcacaggcaacaaaagaaaaaaatagccaacttgaacttcattaaaatttaaaatatttgcatcaaagggcaattactattggtgaaaatgtaaaccagtatagctgctatgagaaacagaatgacagttcctcaaaaaattaaaaatacaattatcatatgatccagcaattcttcttctggatatatacccaaaagaactaaaagcaacatttcaaagagatatttgtacacccatgttcatagcaatattattcataatagctaaaacatggaaaaaacaagtgcccataaattaacgaacagatatcaaaatgtgatatatacacacaatgaaatattattcagtcttaaaaaggaaggaagttctcacatatgcttcaacatggataaacgttgaggacattatgctgaatgaaataagccagtcacaaaaaagaagaatactgtatgctttcacttatataagttacctagagtagtaaaaattatagaaacagaaagcagaatggtggtttccaggggctagaagaagagggacatggagagttataatttaatgggtgtagagtttcagttttacaaagtgaaagatttacagaaaaggacggtgatgatggttgcataatataaatgtatttaataacgctgaatggtacactaaaaaaattaaaactaaaatatctaattaccacatgacccttcagttgtactcctgggcatttacaccagagaaacaaaaacttaggttcacacaaaaatatgtacacagatgatcatagttgtttagtaagaatagccaaaaaccagaaacaagtcaaatttctttgaacaggtgaatggctacactgtggtacatctataccatggaatattatccaattcagtataaaggaataaactattgatacatgcaacaatatgaatgaatcttcagagagttatactgagtgaaaatggccaatcgccaaaaattataaactgtatgattccatttatataacatttttgaagtggcaaaattattgaaatgaaaaacaaattagtggttgttaggggtcaaggatggggttggagggacaaggtgtgaccataaaagagcaatatgaagaatccttgtggtgatagaaatgttttgtatcttgattgtataatgtcaatatcctggttgtgatattacactatagttttttaagatgctacaattggagcaaagtaggtgaaagaatatggatatctctgtattatttcttataactacatgtgcatctacaattaattatctcaaaaagtttaattttaaaaaacaagatgacactaaagtagaatttgggaggaaatttatagtactataggcacatattagaaaagaagaaagttctcaaattaattaactgtttccactttaaaaactagagaaagaagatcaaattaaaccccaggtaagcaaaagcaaagaaatttaagtgatcaaagcagaattcaatgaaatcgaatatagaaacacaataaagaagagcaacgcacccaaaagttgattctttgtgagaatcatgagaatcaatacaattgataaacttctaggcagatggataaggaaaaaagagaagatacaaattacaaataacaggagttaaagaagagacatcaatactgatctcaaagacattaaaaatatgccaataaatttgaaagtgcagatttttcacaatagttactcatttcttaaaaaataataaactttatttggtcataaatatttatcttacctgaatatttaaagaaatgtaattggcattactgtggcagataatgaaccaaaatttaaggatacattcgtatagcacctgttctcgtcccaatagccaagattttctgaactggatcaaaggctaatgctgtgggctgatgaggaaaaccatgccgaactgtctgaaagagagcaaataataccaataagtctctagggaaataaaaattacaatcacaagataccattatatagccaccagaatgtctaaaattagtttaaaggaaaaaaaaaagctaccaccaaacattaacacagagatggagtaacctaaactcatacattgctgatgggagtgtaaaatgatacaaacacttttttaaaatatcttgcagtttcttataaaactaaatatacatctgtcttacaatctagcaattccactcctatgcatatattcaggaaaattaaaagcatatgttcataaaatgatttgtataagtaagaccctaccagctgtattcaaaatagtaaaaatctggaaacagcccaggtgtccaacaaaagaattaaaaaaacaaactgtgatatgatataatcatacaatggaatactactaaacaattaaaagacacaaactactgatagatgcaacaacacaaatgattctcaaaaaaaactatgctaagaagccatacacaagtttataaaatcagaacagtagttgtcttgaagagttattgattgggaaggaatatgaagaaacttttttgagtaaagatgtaatattctgtattttcatagcaatttggattacacaagcatatacattagttaaaactcataaaatggtacaataaaatttgtgatttctctgcatataaattacacctcaaaaaatgttaagaaattattagaaacaaatattaaaatctattcaatgttatgtatacggaggtgttaaagggtaaagtatactgacatctgcaacttgaaaatgcatccacaaaataatatagatacctgggtggacagatggatagatagatacatgataagtgaatgataactgtcaaatattagtggtaagaatatacatattagtgagtgttcacaatataattctttcaacttttctttctgttcctgccttatacatctaataaatggcatgtataaaaaacctacatcataaaaattagtgaaagaatcaatgttttccttctaaggttaggaatcaaacaagtatttccactctatccacctctattcaatattgtactgaaggttctatcccatccagagcaattagacaagaaaaagaagtaagacacatccagataggaaggaagaactaaaactatctgcaaggaacacaattttgtataaatgcaatcctaagaaatacactaaaaaattattagaactaataaaggagctctgcaagctaaagttacaaaattaatgtaaaaaactcaattgtgggctaggcacagtggcccatgtctgtaatatcagcactttgggaggccaaagcaggaggattgcttgagttcaggagttcaaaaccaacctgggcaatattacaagaccccatctctacaaaaaaaaaaaaaaaaggaaaaattcaccaggcatgatggcgcacacctgcagtcccagctactcaggaggctaaggcagaaggatcacttgagcccaggaggttgaagctgcagtgagccatgatcatgtcactacgccccagcctgaacaacagaacaagacctcatctcaaaaaaaaaaaaaaaaaaaaagtcaattgtgagatctttcaaggctattggagctactggcaaaaaattactgtatagatttccactgctgcttatttataatgagtagttttccccactccaagtttatatttcatatcatatttgttcaacagctctttaagtgaatctatttcaagcatgtctgtaagatccatttcttgttagaacaatgcctgacaattgcttagaaactatatggaaaatgggctgggtgcagtgacttgcacctgtaatcccagcactttgggaggtcaaggcaggtggatcacttgagcccaggagttcgataccaccctgggcaagatagagagatcttgtctctattaagaaaaaaaaaaattagctgggcatggtggtgcatgcctatagtctcagatactctggaggcttagataggaggatcacttgagcctgggaggttgaggctgcagtaaaccatgatcacaccactgtactccagcctgggtgacagggtacaaaagaaactatacggaaaaaattttaaaaattgtacacacccttattcattgaccaaggatattgtttattgataagggcatgggtactttatatagttgcatgatcaagcatccatcaatgccaaaagaagaaaaatgacattaattgttgtcagaactatagaaacggtgagttgaagtcactgcttcaaagtgtttttatgaagataaatgtcttgattcaccatgttgcaaaatcaccattataaatccagtgctttaccattaggctataataaaggcttttatgaggacttaaaagtgaaatattaaaaaaataaaaagtcaattgtattcctgcatactaacaataaactatccaaaaataaaataaagaaccccatttataataagtagaatccaaaggaataaaatatataggaataaaatgaacaaaagaagtgcaaaatttgtactctgaaaactacacaatattcttttaaaacttgaagatctaaataaaagtcatcccagatatctatagattaaacattaatgtggcaatactctccgaattgatattaaaatcaatgcaatctctgtcaaaatcccagctggcttttttgcaaaaattgacaaactagcattagttatatctcccaatgctatccctcccccatccccccaccccacaacagtccccagagtgtgatgttccccttcctgtatccatgtgttctcattgttcaattcccacctatgagtgagaatatgcggtgtttggttttttgttcttgcgatagtttactgagaatgatgatttccagtttcatccatgtccctacaaaggacatgaactcatcattttttatggctgcatagtattccatggtgtatatgtgccacattttcttaatccagtctatcattgttggacatttggattggttccaagtctttgctattgtgaatagtgccgcaataaacatacgtgtgcatgtgtctttatagcagcatgatttatactcctttcggtatataccccgtaatgggatggctgggtcaaatggtatttttagttctagatccctgaggaatcgccacactgacttccacaatggttgaactagtttacagtcccaacaacagtgtaaaagtgttcctatttctccacatcctctccagcacctgttgtttcctgactttttaatgattgccattctaactggtgtgagatgatatctcattgtggttctgatttgcatttctccgatggccagtgatggtgagcattttttcatgtgttttttggctgcataaatgtcttcttttgagaagtgtctgttcatgtccttcgcccactttttgatggggttgtttgtttttttcttgtaaatttgtttgagttcattgtagattctggatattagccctttgtcagatgagtaggttgcgaaaattttctcccatttttgtgggttgcctgttcactctgatggtagtttcttttgctgtgcagtagctctttagtttaattagatcgcatttgtcaattttggcttttgttgccattgcttttggtgttttagacatgaagtccttgcccgtgcctatgtcctgaatggtaatgcctaggttttcttctacggtttttatggttttaggtctaatgtttaagtctttaatccatcttgaattgatttttgtgtaaggtgtaaggaagggatccagtttcagctttctacatatggctagccagtttttccagcaccatttattaaatagggaatcctttccccattgcttgtttttctcaggtttgtcaaagatcagatagttgtagatatgcagcattatttctgaggcctctgttctgttccattgatctatatctgttttggtaccagtaccatgctgttttggttactgtagccttgtagtatagtttgaagtcaggtagcgtgatgcctccagctttgttcttttggcttagggttgacttggcgatgctggctcttttttggttccatatgaactttaaagtagttttttccaattctgtgaagaaaatcattggtagcttgatggggatggcattgaatctataaattactttgggcagtatggccattttcacgatattgattcttcctacccatgagcatggaatgttcttccatttgtttgtatcctcttttatttcattgagcagtgggtgcagcgcaccagcatgtctcatgtatacatatgtaactaacctacacattgtgcacatgtaccctaaaacttaaagtataataaaaaaaattgacaaactaatcctaaaatttaaatagatatccaagagactcataataacaaaacaatcttgaaagagaacaaagttaggtaactcacatttttctatttcaaaacttatacaaacctaaagtaatcaagaaaataaggtattggcataaggatagacatatagattaatggaacggaaatgagattccagaaataaatcctcacattttcagtccattgatttttgaaaagagtgccaagacaattcattgaggaaagactaatcctttcagcaaatggtgctgtagcaactctatatccacatgtaaaagaatcaagttaaatcccttacttataacatacacaaaaattaactcaaaatggatcgtacgtttaaatataaaagtcaaagctataaaactctaagaataaagaaatctgtttaaatcttagtgacttcaattaggtaatgtttttttaaattattttttaattgacaaaaattataaatgtttatggttagaacatggtgttttgatgtatgtctacactgtggaaaggtagacaatggtttcttaaataaaacaccaaaaacacaagcaatgaaacaaaaaacagacatattgaactctgtccaaagcaaaaacttatgcgctataaaggacaccatcaaagacagttaaagaaaacaaatctggaggcattacattatctgacttcaaactatactacaaggctatagttaccaaaacagcatggtactggtataaaaataggcatgtagacaaatggaacagaataaagaacccagaaatacagctgaatattttgacaaggtatttgaccttcaacaaagcaaccaaaaatataaggtagggaaaggacaccctatttaacaaatggtgctgggataattggcaagccacatgtagaagaatgaaactggatcctcatctctcactttatacaaaaatcacctcaaggtggatcaaagtcttaaatctaaaacctgaaaccataaaaatcctagaagataacattggaaaaactcttctagacattggcttaggcaaagagttcatgaccaagaacccaaaagcaaatgcaacaaaaacaaacataaataaatgggacctaattaaactaaaaagcttctgcacagcaaaagaaataatcagcagagtaaacagacaacccacagaatgggagaaaatattcactaactatgcatctgagaaacaactaatatccagaatctacaagaaactcaaacaaatcagcaaaaaataaaaatataaatataataatcccatgaaaaattgggcaaaggacatgaatagacaattctcaaaagaagatacacaaatggtcaacaaacatgaaaaatgctcaagaccattaattatcaagaaaatgcaaattaaaaccacaatgagataccaccttactcctgcaagactgaccataatttaaaaatcaaaaaataatagatgttggcgtggatgtggtgaaaagtgaacacttttacactgctggtgggaatataaactagtacaactcctatagaaaacagtatagatattccttaaagagctaaaagtagaactaccatttgatccagcaatcccaccattggatatctactcagaagaaaaaaaaaatcattatatgaaaaagacacatgcacaggcatgcttatagctgcacaatttccaatcgcagaaaaatatggaaccagcctaaatgcccatcaaccaatgagtgaataaagagaatgtggtatatatacaccgtaaaatactactctgtcataaaaaggaatgaaataatagcatttacagaaacctgggtggagttggagaccattattctaagttaagtaactcaggaatgaaaaaccaaatattacatgttctcacatataagtaagagctaacctatgaggacacaaaggcataagaatgatataatggattttgggggctcaggaggaagggtgggagttgggtgagagttaaaaactacacattgggtacagtgtacactgctcaggtgatgggtgccaaaaatctcagaaattagcactaaagtagttatctatgtaaccaaaaaccacctgttccccaaaaactattgaaataaaaatgggaaaggataatccacagaatgggaaaataatttgcaaatcaaatatctgaaaaagaacttaatccagaatatataaagaacccttaaaattcaataaaaagacaaataacctaaatttaaaatgggcaaaggatcttaacagacatttattatataataaataaataatatatataaatggccaataaacaccgaaagatcctcaacatcattagccattagggaactgtaaatcatatcaacaagatacaactgtgcacccactaggataactataataaaaaacagatatattaacacatgttgataaagatgtaaagaaattggagccctaatacattgctgttagaaatgtaaaataatgcaggctctttggaaaatagattggtagttcctcaatatatgaaatacagagttaccatatgattcagcaattctgctcctgggcataaacccaagagaaatgaaaacataaatataaacaaagctcttgtaatgttcatagcagcattattcatagcagccaaaaagaaacaactcaaatgtccatcgactgatgaataaataaacaaaatgtggtatatccacacaatagaatattgttcctcaattttaaaaaatgaagtactgatatgtgctacaacatagatgaaccttgaaaatgttatgctaactgaagaagctagtcacatactgtatgattccatttacatgaagtgtatagaataggaaaatctatagaaacagaatttatattagtggttgccaagggatgggggttcagagtaataggaattgactgttaatgaatacaacgtgcctttctggactgatggaaatgttctaaaattgatcgtggaggttgttgcacaactctgtgaacataccaaacaccactgaaatgtacactttaaataggtgaattgtatggtgggtgggttatatttcaatttgaagtaaaagaattttttcttctcaagaacaccaaatcgtattatgagacaaagtatgcaataaaaagttgacatcagttggggtacctagttgatttcaaaagaatcaaggacatcaactggaatgatatagatgcagtaggaaaaaaggagcaaagaaaatgtagaacagagtttgaagacaactatgttaagcttaaaaaattctcagttttagacaaagtcaaaaagtgttcttgaaatattataatttatgctcagtgaagtaagataatggtagcaaagctagtaaaaaataagtgaatttcttaatatctagctcttcttaatgctactttgctttgcttgttttcttttgttccactctcccttcaaaatattacaggaatgaagtggccaacgtatcaatagttacacaaatctatctagatatttgaagcaaataaatatgtaatagaaagaattagttacaaatatgtgggagggctagtcatactaccctgagttaaggaagttgctacctcttctgaggatgaaatacataaacctgtactcagtgctgatattgcaagaggcactaccggaaacaaaatgacttttgcttcccctctactttttaatttgacataagtgcctcccattggcagaatctaaccagaacccagctaccaaaaaaatctgaatattttagtgtagttttagttttagttttcttagtataattgggaacacaaagggaccaggatagaactaacagcagtactttggcaaagcagaatttatattaggcctgattgttcaggcttaatactgtcataatgtggcaaaatagcctcaaaaccacctgtgatggggactgtctactgttccccaatgtctgcatttttcccttctatactaatagaagttttagttcagcagataacaatccagttaaatactatatttatcagcctccactgcaggctagaccagatcgtgaacaaaggaaaacagaagaaattatatataatatattcttaatggtaaaggcaaatattctatttttcttaccttctgactgattggaaaatagatacaatagcaggagttagaacagccatcttagaatatgaaatggaagccatatgttgaggatggcagaacaagatagaaagatcttgttggattattgacaccgtacaatcatggaatcagttcaaggttgcttttgattggacatattcataaaagacagataaatttctatattgtttaagccacagttattatggcctgttacagtagcctaacttgcatcctaatacataccccaaccattcatttttaaaaagaagtaaatattagatcaccaagttaatttatgaggaatgcttcccagtattgatcatcagcctaaaaaatgaaaaaaataaatatggcttttgattctaaagacttctagtgtgctatcatattaatggttcatgctgtgaaagttgcagataccagaatgaaatcattttttgtagacccaaacaaaccagagctggaaaagcgaaaagcatgaagggttcatgcttgcatgtctgagataaagactgtctcaaggactttctaaaacaactccaagagaaattcttttttcagtactgctataattaatataagatcctcttgaaagaacacttgcccagtaatagcgtttccaccaatgaactgatgccaactctggctttgagtctccaaaaccaatgacctctatttccaagcagtttatgtgaacttctccttttgccaataccagcttcgttttactctcgcctcttcagatgcatacatggcttggcatggctatgcatctcaggttaaaaaaaacttcatttctaattcccaaataaattcaacatatttggacatatttttcatctgatttttttggttgacattgcatatatatatcatattcaaataatactgatatgccaaagctatcatttctatatttgaacacagaactcctagaagcattgtaccaggtttcacttaataatattaatgtaaccattggaaactaccatgtatagaaaataataataatacctatatgtaacagggaatagaatattccaattatgaaatacatttattttatttaaaaattattctaggtagaagatttgccagtaaatagctatgattacctaatatatgctatgccttttctgatattaggttacttgtcgagtttttggtctacagatgttacactctgggtaaagtgtggattggggcatatcattccagatcttgaattcagaaattgtacataaactgtctcaaaatttatgcagtaagtcatgaattgatataatttgagataaaatatctgtagtaaggaacgtgatggacacaacatattttgccactttggtaaacaaaagccaattattactggaactatggagcaactctcattgttgagaaaggtccctcaatttcaatgatgcttgttttcaataacagccaaatcatttaaaccttgagttttttaggattatgtgtgtatgttcacagctcttacctaaatctgatgtcatcttgggtcactgaaagtattgctgaataatttcctgctctcttggatgaaagaaaagactaagtaaaaggtctataatgcatatgacaccatagagtggcataacggtgatagaaataacaagttcccatgaaactccatcacattgtgattcaaaaaaataaaaaagtaagattgttctgtatgcacaagagtggcaaattacctgctcacgtaaacaaccactggtcattggcgatggaagtattggtactagtttctcagtaagacttacaaatctcttgaaataacaaggaaactatcacattcaaagatccaaaaggtagttatattaaattgttaaaagaataaagcactaatccactcccattttatatttggaaatatatataatagaaatgggatatttgttcattaacttattttttgaaattttatatctaacttttttctcttctcatgctagttttatttttaacatagtctatcatgcacatagtttaacaagtcatataattctataggacatattaagataattaaaagtcatatgtctccttccctctcccatttcctacttcccagatgcaaccacttttcaatattttttgctctttatttttgtatttttacttaatgtgtctcaaaataacatttttacattgctacttactgacttttccaaagggaaaaaaaaaggattctctttctcacctacccccattacacatacaagcatacttcccacatccccatcctccaaaaaaaaatcctaactgttcagtctctactaactactactcttttactttgccacacaaatgtttttgttccctggggctaatttttttaaattttcttcatttccttagtttttatgtgcttatcactaattcagtcccaaactcttcccccaattgccctcatctttcaatatgttaaacatcagatacatatattcaaacagaagagacagagaaaaagagagaaagcgagacagagagaaaaataaactatataagatactaatgatccagtttaaaaaaaaaaaagaagaagaagaagaaaacagttgtttcctgggtccaaggcagaaaagatggatgggctgctgcaaagggccacaaaggatgaaatagccacaaaagggctattttgaatatagtagtaatttcacaggaaactcatcatattttatagtctacataatatcagattgttttaagcattataaagcaaatgaagacttataaatataggtgcaaaacactaaataagatactgataaatcaaaaccaagtgatatattcaaacaatgataaaccatggccaaacacattttattccacaaatgtaagtatagatactaaatatatatacctcatactcttattagttactaacttattttatccttttcctttccttaatttaaattttgagttttccagaccctagccttcaaattgtgagaacttctaactgcttacaaaataaaccttggcaagatacagatacagaaaagcaaatgatattcttcatcatataaatgtctttgcaaatgttgtctctaaaaaggagtcttacaagacagctgtactttacagattgctgctacctcttgtgaatataatctttagtctctaaggaatctgtaattctgattgtttgttttacttaattttttcctgtgataataatttttaattgacatagcattttcagaaaaatataaatatgagttaattttatttacaaagccagaaaattattcatactttttctttttcatggaagggaaaataaataaaatttaaaacatatttctgttagatttcaacaagaagttgaataaggatttgtattgacattattcattaatcaacaaattaaagaataaaaccatgattatatcattaggttctggaaaggcatttgatgaaatttagcagtcaaaccaggtaaatatgtgaaataggattagaagaaaatgacataatgaaaataacaaacatatgctaaacaacaaaaaactacagtcattcccattaaaatcaggaataaaacatatatatttgctattcccattattattcaactttgttttataaattcaagctaattcagcaagacaataaattgaaataatgcatataaatacaagaaaatagaaacaaattactaaaaatgttttggaaataaaagaatgtggtaaattatctaggtagaagattaaaacaaaaaaaaatcagtagctattacctatactagcaataagcaattaccaaaaaaaaagggaggaaattcttatttatatttctagttgtaaatttgaagtctgttaaatttgttaaaagcctcaaaacaaaggttttattcagtaacattgaataatatattttctattatataaagtggttagaaagacaaaatacttttcactagcttggaacttagattaacctgttttcataatcttcattaatagcagtattatattcatatatctcaatgtttattgaatactacagaaattacaataccattgttataattctattagaaatacagagccgatgtcatcaatttctactgtagctgtgacaataaaatcccatcagaatttagtattcaagaagtaattatttgtttatatatctcaagaacaattttaatattttgctttgattggagctgctaataaaatatcttttcaaagtatcttcaaaaacctaatagtcataaaattatttatacacagcgattaaacgaatgaggtcctaaatgttagcatttttcacaaataaaatattcacctatttatcttctcaaattccaagtcaaagccttactgctacataaaatatttgttaaaatgctaagccaacaccacagcttaggtgttttaaatggcttgtgtttaaatgcttataggagcatatgtgtactgaattctccttgaaaataatattcagctcactgtgaagacatttaatttttccttttttgatttttccatttttattcaaagttattgacgaatgatatggcactttggtctccccaaataagttctaaactcctttataaacagacatcatgccttccatttgcccccttcactgagcctagtgccacgattaaatattaataggtagtgttttccagttcattgatatgatttgtgtatataagcagtttttccttcaaaaactgttatgtcatattttaagaaaggtaaataattgtaataaagtattttgtaaatatttaaataaattccttatctagaataatgtttaaatcaatatataattatctctgtattcagagctgttgtctgaactttctatagtaatgaaggcacatttaaaattttttttaaaagtacagtagctttcattctcacccttttcccactgaccatccttgtgactactgtcaccatattaaactgaattatataatgctaggatgttagaacagaatgagcacctacatttttacaatattttatgcagttatataattgccaatatgttatgcatactaatgtattattaaatctagtgattattacagattaaaagtagattattctttactacctgtgtttcttccctaccgtattaattacttgagatcagagattctattgtttaaagctcaagagccttataagcattcaaaatactacttatttttatcaaaattcatatatatgagtaacttattctgtaattcacactgttaatcttaccccaaaactcatgattgagataatgcatgttaatatgctctgtaagttgaacatattatgtaagtacaaatttatagtacttaaacttaaaagaaaagtgtcctttcaaaacacgagagaatcaagttcaaattaaattcatttaccatctctaaactatctcatcatctctcatactatcacttcctttcataatattatatatatatatgttaaaacataccttcaaagaaacacatcaaattatatatattaacaggcccaattcttgccattgaaaagtatatatacataccaatatatagtgacagagtaatacgaataccagcacactaataacatgaactaaccatgggcataacccctaaaggatatccaatcctatcatctttattattcaataaagaacacaagactgaaagaacaatctctcatgtagccagatagtgctctacaaataaattccactgtttttttttttccacccctaggactcattttcatcttcttacgtgattttaccatctggcttatatattttctctctactctggaccctatcaacagcctcagagtcttcaatatccttgcttcaatttatcatacactttgacctcatcattctgtcctctctttcaactcaacaaatcatcactaattaatatcagcctcaaatgaacacagcctcgtcatcatactcttctagactcttaagaactcaaatttggtattccatttcgcagtatcttttatggtcatggcttccactccatctttcttcctgccctagtacttccacttaaattctcctgcttgtctgaaacttttattttcttcctagctacactagcttctctccccagagtatttaacatgtaaacacattgcaacttaatactgtatcacatttgaaaaacataaatacatcttttgttgaatctattttatgtgtctatatagctatcaaactaatttatatgaacttaatgatctttctcattgatatataataaaaatggaaattagcagtcatagaaaataatttggcttttgggtaaaataaaaaccacttttaaaaaaaatgaaaatcttgtgaaacaaaattacagaaatagaatgacatgtaaaaatattttgttagaagtcaggagacgtagttcagttctcaggtctgtcactggcaatctaacctggacacattactcaatctctcagtttcttcatctataaaataaaagagtgaactagatcattttaaggtccccttccaattccatctgtacttctaatacaaatacttgtaccggaaaccatgttaaacacctgattaaatacctatagacacttgataggtatttctatatttctcagtaatagtgtatttcttaaaagaaacaagaatggggttatgtttaacgttatgttcgacgattgaaaaagattagttatctaactaattatggtgttaaactactaaagacgatttgctgttgctttcgtctgattccctcatgagctacacacttgcatttcaaacagtccactgagatatcaggtactgttgttatttctataaatatgaatagcttttaggtatctgtgggttacctcttttcctcagatggtgacttcttcaatttccagtagtagacaggggagggggaacattttgagcctccatcataaataaaataaaatctaaatacacaatctacttacagaaacagtatttttgtcccctaccaaagaagtaatatagtccatgtctttctttcttagcttatttgttgccagttgcaaagaacttgaaaatgacagctgtcctcttgctacattagcaataaaccaagaagtctatatgtatacaatccttgcacccagggctgatatccctaccatttgtttactacgtactagacacaatgaaaaacactttacgtggattatatcatttaatttttatttatttctatagccccatgagatgggtggtatgattacaaatgatgaaattgaggcttacaaaggctaatcaaggccaggagtcctgacacaagcctgtaatcccagcactatgggaggccaaggtgggaggatcacttgaggctatgagttgagaccagcctgggcaacatagtgagactccatctctacaaaaaataaaaataaattagccaggaatggtgtttcgcccctgtagttccagctacttgggaaggatgaggtgggaggatcccttcaacccaggagttcgacactgcagtgagctatgattttgccattgcactccagcctgggcaacagagcaagcctctgtctctaagaagaaaaaagaaaaagaaaggctaatcaactgttcaaggtcaccaacctagtgaatacacatggtgtgactgatagctttagaatgagagctatatagcatttcagtagtttgatcccatctcgagatgaaagaacttgatttgccctatatgaatttaagaccagagacaaaaatggctttcaaaagaattatagcttggtgtagagtcaagatcaaccattgagttaaaggaaccacaggataataaccaaatgttttggatttgggttgctcaacctgtacaacctttcagtgggacaatttggtcgcatatatcaaaaacctttaaaaatatgctaactttctagctgtgaagttgctctcctaggaatttatcccaaggaagaattctaagtatataaagatgcacaaagacatttaatgtagtatctttaggaaagtaaaatattagaaataattgagtactgatttaaataagccaggatgcttaatagaattctatgaaccacttaaccatatataaaaaataaataaatgagcagacaaggaagatgttaataatatattaagtagaaatattaccaagaagaatgtatcaatcccatttttatataaaaactttttacatgtaatcataaacatagaaaaacatcacatataaatactgtgaaacattaatgatggttatatctaggtaaaataatagattgttctgtttttgcttacctgtattttctaacttttttacatggaagatacattacttgtaaaataaaaaaaaacttttaaaagaaaaagaatgctggatacatcttaaacactcactaaacacttctcaattttaaaataactcatagtaaacctcaatataattaaaaggttaaacttatgcccctattattgtgtatcaaaatcagatttgagtctacgaagtaactcagaaagttgtaaatcattaacaattatttactactattatgatactgagacccttgtttaagtatataaattaattccaacatagaccctaagattttaagtttttttgtttgtttgttttttaagatactgaaatttccatttctagtctggcatgtggaagcttagatagaagtcatcgctctcctccacaaaacaagaaaaaagcaaagaaactgaaaatcaacaactttctttagatccatcagaaaactaaggtcacaggacaaattgctgtcccaaaaacagagagacagacaggcagatatagggatcacaacatacctgagcagaaacctaaggacagaaacttccgcgtgggaagcagtaacagggttcgagctacagtgattacagcctaaaatttaactgacaaattgctggaggtttaatgtgaacaagtttgagagttaaaaactctggtggagtggggagggttagaggtgtccctacacttttgtgagttttacctgcaactcacttttgtgaggttattacagtgaagatcagaacaaaatttcaacctgcttccagcagagggagggaaaaaggagtcattttgaaatatactcagagcattctgttcttaacaagacctgtcctcaagagaaactagtttccacttaaaactagtggaaactagtttacttaagtaaaactttatccaagtgaggttttacacacagcctaaccaaactgaaggaagagatatgcccacctccagccatctccagccttccaggtaggggaagagagaagaaataccaactctagccttcctgtctcccctaataaaagaaaaataaatcaacctgagaagcacttgtgaaggtcacagcccaaggacacaggctcactaaaagactgagtcctaattatagacctacagaatgttttccctcccccacacctcaacaccacatcaatagggctcctataataacaggggaaaacaacttttaaaaactgcatgtggccaggcgtggtggctcacgcctgtaatcccagcactttgggaggcctaaaaatacaaaaaaattagccgggtgtggtggtgggcaccagtagtcccagctacttgggaggctgaggcaggagaatggcataaacccgggaggtggaggttgtggtgaaccgagatcacgccactgccctccagcctgggagacagagcgagactctgtcaaaaaaaaaaacctgcatgtatcagactttatttaagaaagagtctctaagtgaacctaaagacaactgaagatacaaaaacaaggacacagaaaaaaattttgccatctgacattacagctacagctacagcaaagaacaatcacagcttgaccccaatcagataaacataatctcaaactaaaagcctatgtatctcagtcccttttatcctgtgcatccttttttccattttaaaaattacaagatgtactaaaagaccaaaaaagacacagtttgtagagacagcaagtgtcaaaaactgcatcagacatgacagagattttttaaatctatgattaataagctatgggctttataaaaaacagtggataccatgtaagaacaggtgggtaatttaagcagagaaatggaaactctaagaatcaaaaagaaatgctagaaatcaaaagccctctaacagaaatgaagaatgtccttgatgggctcacctatagactggaaatggctgaagaaagaaaagagtgagcttgaagaaaattcaatagaaattttcaaactgatatgcaaagagaaaaaagaagaatcgaatatcctagcactatgagatgattatcaaaaaatgtaaatacacataatgggaatatcagaaaggtcaagagaaagaaacagaagaaatatttgaagcaatagtgactgagaatttcccaaaattaacgacagacaccaaaccataattctaggaagctcagctcaccaaataggataaacaccaaaaaatatatgcataggatattatatccaaactacagaagatcaaagacaaagagaaaaatctttaaaaaaaaacgcagaaaaactaaactttatctattgaggacttagggtaagaattatatcagatttctcttcaggaacaatgcaaaccataaaaatgtgaagtgatatgtttaaagtgttgaaagaaaaacaccacaccaacctagaattctgtatccaataaaattattcttcaaaagggaaggagaaataaccttcttgaacaaacaaaaattgagggaatttgtcaccagtagatcttccttgcaagaaatgctaaaagaaattcttcagaaagaaggaaaatgatatgggtcagaaacgtagatctatacaaagaaagaaagactgttagggaaataataaataagggtaaaaaaaactttttaaattaaattcttaattgagctaacagattttttttttcaaaaatagtaatagcaacaatgtacttggtgattataacctatggataagtaaaatgaatgaacgcagttataaaggacaggaggaaaaaactggaaatactttattataagggaacttgcatggctcatgtagtggtacattgttatttaaaggggtcttggattagttgtgaatatatattgcaaacctaagggcaaccactaaaaaaagtataaaaataagtagaattaataagagaggagagaaaattgaatgatataaaatgctcaaagttagacaagacagaaaaagagtataagaccaaaaaaaaaccagaaagaacaaagccaacaaataaaaatggtaacaaatatgatagatattaattcaactctatcaataaccattttaaatggcaatgaattaaatatatcaattaaaagacagagactgtcaaggtggattaaaaaaccagtcccccactatatgttgtctacaagaaacccactttaatataaagacacagactgattaaaactaaagggatagagaaagatactatgcaaacactaattaaaataaaacaggtgtagctatagtaatttcagataatgccaaattcaggacaaggaaaaaaaataccaaggataaagatggacattacgtaatgataaaggggctaattcttccagaggaaataagaatccttaatgtctatgtgtctaacaatagagcatcaaaatacgtaaagcaaaaactaatagaagtacaaggagaaatagataaatccactataatcgttggagacttcacccctctctcaataattaacagatctcacaggccaaaaattagtaaagatatagtaaaagttaaaagtaccatcatcaactggatctgattggcatttatagaatattttatccaacaacagcagaacacacattcttctcaagttcacacaacattcgcaaaggtaaaccacattctgggccataaaacataccttaacaaatttaaaagaatagaaaccaaacaaagtatgctctaagaccatagtgtaattaaactagaagtcaataacagagagatagctggaaacccccaaaatacttggagattagacaacacacttctaaatagcacatgggtcaaagaagtcatatgagaaatttacaatatactgaaatcttaacatgcctcaagacaatttagcaccagaaattattcttaatcttggaacacaggcagaatgtacaactgagacagtgaaaagaaagactgaacaaagagaaatgaaaaaaaaaaaaagaaaaagaaaactagggaaagaaataaattagagctaacctaggcagagagaatacgaagggcaaaaaaaaagctcaaaattttttgcagtgtgaagttacaagaagaaaatgattggtggtttcattcaaaatgaaattgaaggtttcagcaaactacaatcattcctttaaaagtaatccactctctagataaaggagatttttttaaaactttggtcagtagacctggtattgaattcgttttgctactggttcctaaatgatctttaatcctagttcttcaagatcaagctatttaaattcttgtccactatcatagttcctcccatatcactctttcctctgctcttctaggatctggaattttcatcttgaatattaatctctgcctatgcttaatcacatgaaagcaagtaaatacaatttttagacagattccttctgtgactatgccctatgcacttccttgtctgaatctccacccaatgcagtaagtttctgagtatgattaattcaacagtctggctatcttattaccaaatattaatacaatgctctcatcaaaatatatatttgttaaagatattattttacctcataaaattttcttatatcacacaatttatgtttgccagtatgacagaatgactaaaagcaaagggttgaaaaaaacagcagtgacactactccatcagtatagaatgtttgcagtgatgttggccagataatttagcttctgagatacagttaaaataactgcgtcagctaatgttgcatagtttaggtaaaaaatcagaatattatagtcaacttatctcactcagcctaattcatacacaacagagcttcctgtaggatttttggaatttaattttatttctttttttattattattatactttaagttttagggtacctgtgcacaatgtgcaggttagttatatatgtatacatgtgccatgttggtgtgctgcacccattaactcgtcatttaacattaggtatatctcctaatgctatccctccccctccccccaccccacaacaggccctggtgtgtgatgttccccttcctatgtccatgtgttctcattgttcaattcctacctatgagtgagaacatgtggtgtttggttttttgtccttgcgatagtttactgagaatgatggtttccagcttcatccatgtccctacaaaggacatgaactcatcattttttatggctgcatagtattccatggtgtatatgtgccacattttcttaatccagcctatcattgttggacatttgggttggttccaagtctttgctattgtgaatagtgccgcaataaacatacgtgtgcatgtgtctttatagcagcatgatttataatcctttgggcatatacccagtaatgggattgctgggtcaaatggtatttccagttctacatccctgaggaatcgccacactgacttccacaatggttgaactagtttacagtcccaacagtgttaattttatttctataatagcttttataaacagtttaattttttaaaattcactttatttctacagtaactggaattttgtggattcacctagctacacaaaaaatactaaagcgatttgctgggttgaactactctcagaaaaataaaagctacttcaaatcttctatttatctgctagaattaaaaatggctgcctgctagactattatatggaggaaataacatctgcattactttctcaaagtggagagggaaagaaatgtaaataaatagagaaatcatgtaaataataagagcataagaaatttatatacttaggagagttgtttccaagaacactatttcaagttcataccatcatgtgctgcataatgacattttggtcaacaatggactacttattatgggtggacccataaaattataataccataatttttactgtactttttctatgttgagatatacttagatacacaaatacttaccattctgttatacctgcctacagtgttcagtacaagcaacatgctatataggtttataacccaggagcaataggctatactatatagctaagtgtgtggtaggctatgccatataggtttgtgtaagtacactctgtgacgttcacacaatgaccaaattgtctaccaatgcatttctcagaacctatccctatcattaagttacatgtgactgtatataattacactgtaacaatagctgttatccaacaattacataacaaatacaaatatggcagccattggccatttcctgattattctgggctgatgattgcagagattgtggtttgacttcccagactggttgctgcagggattgtggtttggtttccttctctggttgctgcaaatcgaccaatacaaattgttgcctaataatgagaaattttttttcttatctagttcttaaagcatacctgcttagcaacatattctagcaactttatctacaaaaactactttaaaagtaataaattgattttttaacaaaagaaaaaataagcaacctctaacagctgtaagctgcagtttacctggcactaagggctgggtcatggttttctcttttggaacatgaataatttcacagaaaaccaacatcaaacaaagccactctatgaccgtaataaagcaagacaaaaataaaaccactgtggaatcatgtctgggtagtgataactgtaagaatattgtacaaaccacactaatagctaaaggctccccttatccagctaacatatgcaactgcttcttctttacctattatgtagcctcatgccactcttcctaccttctagttaaaacgtcttaggataacaaatgatagaattaccccactttctgacaatatctaattcgtgtttctttgaactttgtctaaaatgacctaacacaagttcaaatcctgtaacaagccctccctatggtatatagtctcccttattctaaaaaaaaaaaaaaagagaaaacccaactttgtttaactacaggtatgcagtctttggctgataggcacacaaactgtatttccttttaaatattccagaacctagtctacatagcattttggtcagcctttagactgaaaaaagaaattggtatgtgattgccacaagaacaggcagaaagatagaaaaacatagttatcccagttataaatcctagtacatttcaaaacttaatatatgacaaaggagtaccacattcagtggaagagggaagcagcagttaaatagaaaaacatagttatcccagttataaatcctagtacatttcaaaacttaatatatgacaaaggaataccacattcagtggaagagggaagcagaagttaaatggtatggtgcaaccgacgggctgtttgggggaaacatcattttggagtcatactatatactaaaatgaatttggttaaaataaaaatgtcaaaatgtgatatatcaaaacactaaaatatttcaatactaatacctcatgccagggaaaaattagtagcatatttaagacatccaaagaaagaaaaaaaagtcaaggattttataaccaggcaaaatgactttcaagtaaaaaatataaagcgccttacaaactagtatcaaaatgcatttctcaagaaatactgtttccatgaactcttcctgaggaatctactacagaaagagctaaaacacagccaaaacacatcaatataaggaaataatataagccctaaacacacaggtacttataggactatgattaaataacagttaagagagaatggtatgtaataactgttgtgctcactatgtagataagactttgtattagcttgctgggtctgctatgacaaagtaccagagtctggatggcttaaataaaataagtttattttctcataaaaaaaaaaaaaaagaaaatagaaatgaatattcaaactctggattgtagaggataaaaaagaaatcactaaggataagtcaatagatttgacaatagaaaaaaatatgaattatgcaaattagaactatcatgaacaagatgcaaataatgaactgggaaaaattttacaaaactataacagataaaagattgatcaatttaatatattaaaatgtataaaagctaatagaaattactaggaaccaataaataggaagaaaggggatatgaaaggacaattcataaaaaaaaactcaactgactagtaagtatactggaaaataatcaagctcaccagtaatcataaaatacaaattaaataattacaaaagtgtatttttcatttactaagttagtaaaaatatttctaaatatcgaaagctggtaagaataccactgaactgacagttatatactactaggtgaacccttttagaaagtaattcaacaagatatataaagacttataacctaactattttacaactagaaatttcatctcgggaagtaatattaaatatgctgaaggtttaatgcccacagatgttcgtaaaagcattactgtaagaagagaaaaactgaatgaaaattaaatttccagtaataaaagtacatcccctaaactgattgttatacagccattacatttatataaagaaaaaaatccttaacaaccaaaaagtgtttatattctaatgttaagtgaaaaaaaataggatgtaaaattctatataagatccataacacataccaaaatataaccaagagactgactatacaatataatatacaattactaaactacatatgataatagaactctaacctacaacctctgcagcaaccagacaaggaagccaaaccacaatccctgcagcaaccagtctgggaagtcaaaccacaatctctgcaatcatcagcccagaataatcaggaaatggccaatgactaccagatccctaacttccgcagctccctcattcacaacacttccaactcaatactgactagagaaagccaaatatgcttcccaaaccaatcacatagaatgcctcccttgtacacagcctgcctccagcttcccatgccaacaacttacaataagaacatacttaaagcttacccttttttcaccacaaagctctcccactcttctgcctgcgtttgggactctgccaaatacaaacgatggtgggttttgccacagcaaaatctgaatagcctatgtcctcatttgggtggtctttgttaatttccacataacaaaaaactaaacataaaaaaatactaaaatgaaatgcacccaaaaaaatcaataatcattgcctgcatctgcatgtttgaagtatggatacttttgaagtttttttctctctacctactactcagcaataaaaaaagaacaaatcactgacaccatcaacaacttgaataaatcttaacacattgtgttgtataagacacacacacacacacacacacacacacacacacacactctgtataccatatgattctatttatatgaagtctcagaacatgtaagcataagctatggtgatagaagtcagaatttaggccaggtgcggtggctcatacttgtaatcccagcactttgggaggccaaggagggcagatcacaaggtcaggagttcgagagcagcctggccaacatagtgaaactttgcctctactaaaaatacaaaaattagccaggcgtggtggtacacgcctgtagtttcagctactccagaggctgaggcaggagaattgcttgaaccccagagacggaggttgcagtgagccgagatttcgccactgcactccagcctggatgacagagtgagactccatctcaggaggaaaaaaaagaagtcagaatttaattgcctctggaaaaggataaggatgggaaattcactggaaagtgtcaggaagaaatttttagaaaatgtaagatattttatatcttgttttgactgatggttacacagatgtgtataattatcaaaactcattgaaatgagtacttaaaatctgatttttatgtgtaaattttacctcacatacttccctccctgatctttcttattttgctttcaattgtcaactcccaaatgttcagctcttagcaccctattctctcaatatttatctttgttccaagttctttaaatctatagctcttcacagaataaaatatatgagcactgtaaaaaacattaacaataaataaaattatttctactaaatatataatcttgctttgtatgaagacagaaattgttgtattagggagactacaggttccaaaatggcagcatacaaccaaagttgtttcactgcccatacagaaaacctaaacaaatatacatcactgagattattaccagaaataccccaaaactcaaatataagaacaagtcagcttctagggtcacagggaagtgaaaaaactccaagcagacagtaaagagaataagatttccatatctgtgatcccactcacaccaatctgccttgcaccaagagctaagaaaatttcccccaactcatgatttctactttgtaaaaagtgagctcaaggtagacaaccagcttcccccatattttgggttccctaacaggagccctgtctctaccccaacccagggaaagcattagcagtacctgaagtaagaaatatccctgatgacaaagagaaacaaagaggggaggtgggactgccatcctagccttggaaattctgctctgtaactcagccaaaggagacaccaaattagaggctgttcagcagtatcatgctataggaagttcatccatcaggtctgctgggcatgaacccctagccagccttcccacacaacacagaaaagcaattaagaaatttatcagaaaaattggctgggcgtagtggctcacacctgtaatcccagtaatttgggaggccaaggtgggtggatcatgaggtcagaagattgagaccgtcctggttaacacagtgaaaccctttctctactaaaaatacaaaaaatttgccagttgtggtggcatgcacctgtggtcctagatactcgggaggctgaggcaggagaaccgcttgaacctggcaggcggaggttgcagtgagccaagatcgtgctactgcactccagtctgggtgacagagggagactccatctcaaaaaaaaaaaaaaaagaaaggaaagaaatttatcagagaaatttaacaaaaagattgaaatgattcttaaaaatcaaacagaaattttggaactgagaaatatatttgctgaactgaaaaactcactagaggccctcaacagctaaatgtatgaagcaggggaaggataatgtgagctcaaagacaggctatttgaaaatacgcagaggagaaaaatggaatagaatgaagattgcttacaaaatatagaaaattacctcaaaagaccaaatctaagaattactgatagtcaagatggagttgagcaagggtaaggggtagacagcatgttcaaagaaataataacagaaaactttctaaaactagaaaagagataaacatccaagtacaggaaggtggaataccaaacagattcaactcaaataggactaccccaaggcataatcaaactctcaatagtcaaagacagagagaggatcctaaaagcagcaagagaaaatacgcaaataacataaaaaggaggtttaatccattcagacttctcaatggaaactatataggccagcagggagtggtgaaagaaaaaaaaaaaaaaagaactgccatccaagaatactatatccagcaaacatgttcttcaactatgaaggagagacaaagtctttcccagagaaacaaaagctcagagaattcaacaccaccagacccatcttacaagaaatgctaaagggagttcttccatctaaaatttaaaaaaaaattaacttacaaaaacaaaacatgggaaagcataaaacccactggtaaaattaagtacacagacaaacccagaatactctaatactgaagctgtagtgtgcaatccacctataattctactatgaaacctaaaagacaaacctatcaaagacaataatacccacagcaatccgttaagagataagcaattaaaaacataaatggagataacaaaattcaaaatgagggaagagggagttaaagtatagagattttttcccactcttcttcatttgtcctattctttgtatgatctaatataagttgtcatctctttcaaataaacttgttatatctataagatgttctctgtaagcctcatggcaataacagtgcaaaatcctgtagcttcactaaaaataaaaagcaacaaattaagacatattactagagaaaatcacttaaccacaaaggaagacagtaagaaaggaagaaatgaagaaaagagttacaaaagaaccagaaaacatgcaatagtatggcagtagtaaatccttacttatcaataattatcttgaatgtaaatggactcaattatccaagtaaaaggcatagggtggctgaatggataaagatacaagacccaactatatactccttacaataaatccacattctgaaactgaaggggtggaaaaagatattccatgcaactggaaaccaaaaaagagcaggagtagctatatgtagatcagatgaaatacactacaaatcaaagactataaaaacagacaaagaagatcactatataataataaaggagtcaattcagcaagaggatataatgattataaataacaacgcacccaacacgagagctcccaagtatatgaagcaaacattaataaatctagaaagagaggtatactgcaatacaataatagtagggtacttcagcaacccactcgaggctgctcctcatcccttcctccagaagtgtggacattgtcattagggcttcatggttgcggtttaggaggtgaagcccaggcaacggtgtgcattccttgtatcatcatttcaattctgttctggaaatacaaaagaattctagatccatgcatataccctcttatttctccttttgttagttatatatagcctataaagctatacaggaatacaacaatttaaaataaagacaagggccaggagcggtggctcacgcctgtaatcccagcatttgggaggccgaggtgggcagatcacgaggtcaggagatccagaccatcctggctaacacggtgaaaccccgtttctactaaaaatacaaaaaattagccaggcgtggtcacgggagcctgtagtcccagctactcggggaggctgagacagaagaatggtgtgaacccgggaggcggagcttgcagtgagccgagatcgcgccactgcactccaccctgggcgacagagcgagactctgtctcaaaaaataaataaataaataaaaataaataaaataaagacgaggtagactgtaaggatgtaaacaaatggattaccaacaacaggaccaatggaaatctctgacaaaatgaaagactaaagccattctcccaaaggatctcactagttagaaaaatggacctgataatatgaagcatcttctttgtaattgtctctgacatttttctctgagaccagaatttaagatagatagtttagatatttacctgatactaatcacaaaatatatctatatttaaatattactgatctaattccttagattgtttttcattaatgtagatttcatttctattattgcagttttaataatatgaataaatagaagtcttatgcctgtagatttagtaactgttactaaatcaatactttaaaatattttgccctctagcattcattcacatgaatttgactgtttttgctctaatttctttgggcttttctaatttaagtggaatacaattgtactgtgaaacaatgcagtgggattgtgtggtgaaatgaagggtagaatttttgaagatgataatgatgtgaaacatactggtataattactgtctaacacaatgaaataagcttgtccatgagaatagtaataactactgatttgagaaagatagaaaagatagggacgtaggagaaacgtctttgagaaatgaaacatcttttacataaatgtataatgtaattataaaattctaatccttgttgcattccttctgttcctacaaatgtgttgaatattcagttaaaaaaaaaatctctctcagtaacggacagatcatccagccagaaagtcaacaaacatcactgtaaactacacactagaccaaataggcctaattggcatttataaaatatttcacccaactgctgcagaatacacatttttttcatcagcacatggaatattctccagaatagaccatatctcaggccataaaacaagttagaacaaattcaagaaagtaaaaatcatatgacatatcttttatgatcacaatggaataaaactaaaaatcagtaacaagaggatcctcagaaactacacaaacacaggaaaattaaacaacatgctcttgaatgacaaatgagtcaatgaaaaaaattaagaaggaaatttaaaattttcttgaaacaaatgaaaatggaaatacaatatactgaaatctatgagatacagcaaaagcagtactaggagagaagttgatagcattaaacacctagatcaaaaaagcagaaagacttcaaataaacaacctaagatacacctcaaggaactataagagcaagaacaatccaacccaacattcatagaaaaagaaataataaagatcagagaagaaataataaagttgagaataaaaaaaacactacagaagatcaatgaaatgaaaagcttgcttttgaaaatgtaaatagacaaacctttagctagactaagaaaaaaagaatatccaaataaataccatgagaaacaaaaaaaattagagacataataactgagaccacagaaatgcgaggaattattagacactattgtgaacaactgtatgcaaacaaattagaaaatttagaagaaaggaataaattcatggacacatacaacctaccaagattgaaccaagaagagatagaaaacctcaacaaaccaataatgaggaataagattgaagcagtaataaaaagtctcccaccaaagaaaagcctgatggtttcattgatgaattctacctaacattttaaagaacaaatagcaattctactcaaactcttcaaaaaaattgaagagggaatacttccaaacttatcctatgagaccagaattatgaaaaccagacaaagacacaataaaaaaagaaaactacaggccagtatccctgattaacacagatgtgacaatcctccacaaatgcaaaacaataaacgtgatatatcacactaacacaaccaagaacaaaaaccaatcattttaatagatgcagaaaaagaatttgataaaattcaatatccctttatgagaaaaaccctcagcaaactggatagaaaaaaacatacctcaaaataataaaggctataaatgacaaacccacaggtaccatcatactgaacagggaaaatttgaaagcctttcctctaaagtctggagcaagacaaggatgcccactttcaccacttttagtcagcctaatacagaaagtcctgactatagcaattaggcaagagaaaaaaataaaggggtatccaattggaagaagggagtcaaatcagccttgttcacaggtgatatgaccttaccttacaaaaacctaaaaactccaccaaaaaactgttataactgataagcaaattcagtaaagttgcaggatacaaaataaacatgcaaaaaaatcaggagcatttacatgcgccaacagtgaacaatctgaacaaagaaatcaaaacgcaatctcatttagaatagctacaaagaatataaaatacctatgaatacctatgaataaatttaattaaagaagtgaaagatctctacaaggtaaaacactgacaaaggaattgacgaggacacaaacaagtggaaagaatttcacactcatgaactggaaaaattaatattgttaaaatgacaattctacccaaagtaatttacagattcaatgcaatctctatcaaaataccaatgtttcttcacagaaacacaaaaaaaaatcctaaaatttatatgaaaccacaaaagatcctgaatagccaaagaaaccctgagcaaaacaacaaagctagaggcatcacactacctgacttcaaaatatactacagacctaaagtaaccaaattagcatgatactggcataaacaaagatacatagaccaatggaacagaacagaaaacccagatataaatccacacatttacagccaactaatttttgaaaaagttaccaagaacattcagtggggagagtttcttcaacaaatggtgctgggaaaactggatatctatatgcaaaataatgaaactaggccctgtcactatatacaaaaaccaaatcaaaattgattaaagacttaaatctaagaactaaaattatgaatctactagaagaaaatgctggagaaatgttccaagacatcagtctaggcaatgatttttttgtaagacctcaaaagtacacacaacgaaagcaaaaatggaaaatgggattgcatcaagctaaaaatattctgtatagcaaaggaaaccatcaacaaggtaaagagacaacccacagaatgggagaaaatatttgcaaactattcatctgacaaggggtgaagaaccagaatatataataagctcaaacaactcaatagcaaaaataaataaataatctgagttttaaatgggaaaagatctgagtagacatttctcaaagaagacatacaaatggccaacaggcatatgaaaaaatgctcaacatcactaatcatcagagaaatgcaaatcaaaactacaatgagatatcatctcactccagttaaaatggcttttataaaagagacaggtaataatgaatgctggcaaggatgtggagagaggggaactcacacattgttggtgtgaatgtaaattagtacagccactaaggaaaactgtatggaggttcctcaaaactaaaaatagaacaaccagcaattgcactactcggtatatgttcaaaagaaaggaaatcaatatatcaaagagatattggcactgttacatttattgcagcactactcacaatagccaaaatataaaatcaacccaagtgcccatcaatgaatgaatggataaagaaaatatggtatatatacacaagggaatattattcagtcataaaaaagaatgaaatcttgtcacttgcagtaacatgaatgtaatgagaagtcatgttaaatgaaataaaccaagcacagaaaaacaaatatcacaggttctcactcaggtaggagctaaaaagtacatctcatgaagacagagagtatattgtttgccagaggcctggaaggagggtgggaaaatgaagacaagttgattaatgggtacaaatatatatattttgaatcaagaaataatatctagtatttaatagatcagtagggtgactatagtttacaatgatctattgtacatttcaaaatagctggaagagaataattctaatgtttttagcataaagcaaagacaaatatttaaggtgacgtatatcccaattatactgatttgatatttacaaaccatataaatgttttaaattaccatatgtaccccaaaaatatgtgcatctattatgcatcaatttaaaagtattaaatttttaagaagcaggaaagtaccccaaatcatttttcaaaaaaaaaatttgtaagaaatttgagtctgttagcagagaacaaagaagcatgatttaaagataattatttgataattatactgagctgacccagattaaatactttccaatcctttcaaaaagaaattggtgaataaaagagaaactgtgacttaaagagttactttcgtatgttaatagtctcaataagtattagacttgttagggaaatgaaattgtaccaaaagaaatatatttcagacattttccaggttcttttattttagaataaagcagcttttagccaagaagatataaatggaaattaacataggctaaggacaaagagaaagatatcaaatacattataaaataattcaaaaatagtagaaatacaaggaaaaaagaaagaaagagacagggagcaaaaaaacctgagccattgaaaaaagaataagagggagtttcataaaagttataaaacatgaattaaagttcacatgatgtaaattattctgttaatcacattaaaatataaatggttcacagagtgtgtgcttgccttgcaaagtcattcctaaaaaagggttgcccaattaaaaagtctagtttagaatcatatataaaatatgctttcaataaatgtttaaataataagtaactgaattcaccaaatagctagtggggagctgtggcagagcacaagaatattgaatattacctcaaacagcaaaggagttttggttaagatgaaactggaaaaagcaaagaaagagccaacaataaactaccataggatggcagagaatcagaataaggtaccttttgaattatgtaaatattcaataaatgtaatgtacagattatttataaatggaactcaatacatcaaaatgtgttcctcatcagtattttaatcctcttcctaccaccttccaactcagttcttcaagtatatttagcctattaacccaagtgaagaaatctaagttactaataaaacagattttgtccaattcaatttcagctttttgctatataattctattctaagtaactgtagagtgaatccttatcaaatgttctgttctttcacttaaaagaagagctatacaaaactgaatctcatcctatccctcaaattatttatttatttatttcatgggtaaaaatcagtaacgttgagaatccacctcacttttattcactttgacacatactgtgtcttttatgacacttttctcttttctaacattctcagcaaagcctatcctatagtagcatcacaaaatagtacaacagctctcaggatgacctaaaaatattctttttcccattccttaaagaatgttaccatgtctagaaaacatttaaaagttctctatttggcatcttgtggtacactgaacaacccacccacttcctcacatatagccttctagttcataaagaaatcaggacaaagagttatttttttcattaatatacacaaaagcacaagatagctgatcttatcaaaaaacctgtgactttacacaaactgaattaagataacttcaagccaagtgaaaatgcaacatgaaccttgcttggatgccaatctaaacaaatcaactacaaaaagacaatatgggacaactaagggaatttaaacactaactacatgttagattatataaagaaatgttaattttcttcactatgataatggtctttaggattaatagtgtaagcacagggtgaggagaagtgcttatctgctctgtaaggtttttacaggtggaagggtacaatgtctgagatttgcattaaaataatgaaatgtaagagtagcaaataagagaatataaatcagcaagatttgccaaggatgatcattgttgaagctgggggttcaatactattctctctgttcttgtgtgtttaaagttttccataaaataactcaaaaaacaaaaacaggtgaggtgatgaacatctaggtacagagaataacagcccccaaagaacctgtgaatatgttagcttatatggcagaggggaattaaggttgcagatggaatgaagactgctaatcaactaaccttgtaatggggagattaacctggattatcctggtgggcccaatgtaatcataggcatccttaaatattaaaaaagggaggcaggaaagtcagggtggtgacatgttggaaagatcaactggctttgaaaatggaagggggctggttttgaagatgggagggggccatcggccaaggaattgtgatcagcctctaaaagctgcaagagtcaagaaaacaaaatctcctctacagcctccagaaaggaatgcagttctgtgaacacattaattttagcccagtgacatccatgtcatacttctgacctccagaacaataagatgataaatttgtgttgttttaagccaataagtttttggtaattgaagcagcaatacaaaagtcatatgatcttctcatagaatcacatgcttttatttacctgaaaggacataaagcacagatttcactgagaattcaaatgaaatatgtattcttatcaggtaaggagaaaaattccaaattagatacctactgttttattttacttacttatttatttatcttagagacaggggtcttgctatgttgcccaggctggagtactattagtggctattcatgatcacagtgcattagagcctcgaactcctatcctgaagggttcctccccctcatcctcctcagtagctaggactacaggcatgtgctaccatggccaccccttgctattttaaaaggcaaatcttacctctattccccaccctaccattccctttctggtagcctcaattgcttttctgtggattaattgcatcaccacccctacagtgtaccaaaatgatattaaaacctactgtctctgctattttttcaccacttttcttttctataaagtcaattcctcacacatctcccctacttctactcttggtactgatgctactaattatattctctattatattgttgaccttaattctatccatcaccttactgaaaatatgtttaccctaatcaatttcctcttggcctaattcacttgtctctgacaattctgtgttatttgtttgttgttttgaagtttgttttgtttttactatctttgaccactccacaaagctgggacatgcctgagtttctctcttactattctctctaaagaatgcttcagattacctgcctctactcttgaattttcctcatattattctgctcggttcttctctgtctccttttctagtttcacattttccatctacatggatgtttaccaactgtaagcatttcccccagactcaatctaacttcaaaatttattatactactaataattttcaaacttttacagtttacagatttatagacaagtttttagtcaatttataggaacaaagtaaactgaacattaaccaatccagctagttttcttcagagtgtaactaattttattgtgttcattttggtaaagtaaaaataaaagaaagataaaagaagtataacaattttctctcaattccaatctttactttctaaatccaggtattaaatctgcatctaaaaccaccaaaatgatcagttttatttataataaaatttacatgtccaaataagatgtcgattttatgctattgtcaattcaaagagatatttattgaattataaaacacttgccaggtgcggtggctcacggctgtaatcccagcactttgggaggctggggtgggcggatcacctgaggtcaggagtttgagaccagcctggccaacatggtgaaaccccgtctctactaaaaatacaaaaattagccgggcgtggtggtgggcgcctgtaatcccagctacttgggaagctgaggcaggagaatcgcttgaacccaggagatggaggttgcagtgagccaagactgcaccattgcactccagcctgggcaacaagagcaaaactccacctaaaaataaaataagataaaaataaatataaaacacttaactgaaactaaaacaaatacaatattttcaatttcaaattcattatattgattatatagcatcattatataccattatattcaaaataattctataaaccatcaatattaactggtaattttgggcttccaataaaactcaaatcatattcttctttctaatatgttagataagtccagaatatatcataggtgattttgctgataaatcaatcccagaaagcattatttcattcttattatagtcagttggctgagaacagtttatgtcttaattatttttaaaggtgtataataaatacaatatattttcaataataaacatgtcaaaataccttcttgctgcattcattcagtgactatgaatgcttcatttaatcaagtctctccctaagtatcatggtgaacccactatatactttttggagggcttatattctattctttataactaccttctctaaatcctttaaatgttatttctatttttggctgtataaaacttaatcaatgatttttttcctagtccttataaagacagtttagtattacctaggaaattaggaacaattattcagaatacttaatctatatttttaaataaaaacgctagtatattgtgcacattaaaagattagcctttcaaatactaaaaagaattaagaaaagttatcctccttttaagactaaaaaagaaaataactgtcactataaacaaaagcatttttataaagatcatcattttgatacttaagtaggaacaaaaagttccatttttctcttatgagaaaaacaaactcaatttgaaagtttaaagcagggcttctacttgatacttttaatggatatagtcaaaagtcattgctattaaaccaatatgtaagtggctttacagaactataatacaggaaatcagtacaatcatcctattattaaaagtaaatatgaacttaatcctgagatttttcacaggaacatcgtcaaatgaggctagagaaatatctacagaaatgcactaaattttaagaaacagaaatttcgtttacttagtgataatactcctacagaaaaacatacttggaaattatgttaagattttaacttagctctgtatgtatgagaaatacaaaaagtatgacggcactgtttgtttttaagaacatttaagaaccaccacactatacaagaccaacaacccaatttgctgacaaatactagcaccaaaggactttttgtgagaaaatgtgattgccctctaggtaactttaaaattttacaaacgtacttctacacatctataatcctttactcaagcctgcccctacacccttatgctctcaggataagcaaagcagacagcctggagtactgagtcatctggctttggtttctggttcttaaaagaaaaaaaaatctttaattctttctggttattacgcttgttagcatcttagtcttaatggtagattaattcttccttgcctccattaccattcttaaagatgcctctactgtgctttttggtgacaggagaatgtaacaaatccacacatctcagggaatcttctattattctttttatggatgaaaactttataactgtggaactgtgatcatgatcttttcccaatctcagttgcaaaaccgcttaagtaaaatggagtgaaattaggagaatgtggagacaatgaaaatcttgaggaagagatagtattcaaggatatctgggcatttaatctcctttcatcttgctagggtcctggaaagcccaactctctacagttcatgcctgtatttctgatctatacctatttacctggtacgatctgatattatgtcagatatgagcatcattgttataaatccatttccctgcagaagttatactagttaactacatgttgtttctgacattgtgaccatttataaaaacagtttataaatgattatgaatagtgagttggctaatttaagagtttattcagaaatttagggattatgtcatctggttctggtaatatacttattttactctttttttggtaatatacttatttttatcttttgttaattaggtctagaacaccctgtgtgtttgtcactgtcaatctagaacttctgagttgttcccccaaaaagatcatttaaaaatgagaatgttcctaatatcttcttcaataaaaactgaaataaatttaattaaatcctcctacaatcttcttttctacatctgtttgaaaagcatataccatgttcctaaagtggtatcaactctttcactagatgctctccacctctttatataaaagttatttcataaaagcaactccaagaagctgttcaaaataatatctagtttgcttttaacacaacaatctgtatagcttccctcctttaatttattcatttatttgctcaacaaatatttgactgccttcaatgggccaggcaccattctatacatagatgatacagatgtgaacaaaataaagccttgctttatacatatcactgtatatataatctagaaggacttgacacttggtttgcttcaaaagcatgtaatttcttactctgctttaaataaaccaaaactgaaagttgtagatatgaatttggaaaggtttatggaagagaagtccacacagaactccaatcacagaaccaacattcaacagaaaaacgtagtcatttatcaaatgatttgtaaattgtatatttagatgttttcaattaaaataaaatgtttaaggcatatataagtagtaattgctctctgctttaatatctttttcaattaatcgaccaatcatgtatatgcatctttactcatttaaagtgtatcaagtgcccactataatggttttcactaatggctgtgcatagaaatctcctgtggggccattcaaaaaaatgcaagtgcctaggactcatccctagagattttgattctctaagaatggggaggtgctggaaatctctattttagacaccagagttaagaaatactggccagctagatagtgtataccctagcaataagaaggaaacaagaaaaaaaaattatttgcttttcaaagagttcatagtataacggcagtgacagatttttaagaaacttttttaatcacaggaagatgctaaattcacactataggtatatgccagatgctacagaaaaacatagaataggtttttaaaaaagaaaaaaaagaaccctggtgggtagttgaggtggcagtggtcagagctagtctcatagaggtgatgtttgaattatgaggtaaaagatggctgggaattatccaatcgtatgaaagtagaaaaggtattctagtcagaaacgaaagaatgagagaaggcattgagatatgagaaaatatggtatcttttagggaatgcagtatacttagggaatcaagcaaataaaaatggaaaggtaaacaggaatctcttctgaaggaaactctatacccatcaaggtaagcaatttgaaatttattttatagagcaatagtttcaaattgtatttcacagaattcaagttcaggaaaggcagttcatgtatttcacaaatacctggacaatgcaggcattccaatgtatacacattctgaacgattgcagtaacccaatgcattaacttttttttttttttggctgaccttgaaccaaagtttcttctgccatttctatgactttgaacatctcatagatattttgtttattatgaagggtacagctttatactttcacttttttaaggctagcgaacatcctactaccttcctatgggcgatattacacaataaaaaacaaatataaaaagtttttttatcaattggctgtataatttattcttataatttctgaaacaaatgtgtgcccatgagttgccacatttttttgtttgaatagatgttatttactgtggtttcaaataagactttcattttaagagcatcattgctgtaggaaaccaatatagaatttttagcaaggaaatgacataattaacattgtatttcagaaatagccattattgtaacaaaatgaagtgtaatccagtaaaactagaagtaaagagatcagttagaaagtgatttcaaaagaccaagcaagaaaatatgacggaacgaacaagtactggggatgtagaaaaggtcataaatttcagaaatactaaggaaatagaatagaggggatgtgatgactaatcagatagaagagaggaggctttcaaacagccaagtctagatttatactttagttttgcccatgttgaaaaggtagaagcacccagaatatgacagctccttagaactcagaagagaaatttttttgcacatttaatcagggagtctatgagtctaaataaagtccccatttcagtaacggtctaattttgggatttccttagtccatttttatatgttttgttatagaccaggtaattataatacatccatataactattttttaaaattaactatattcctatccaaagatgttacagtattttccacatttagtaagacttcagtactgttagtggacaacttatatagctatctatcttataatttatttggaaatcataagctaatattattataacccactagttatattcgctctactatgaacacgtgattttacaaactttaacaataatattcgtatatattttatcatcctttccatttatgcattaccttcaccttattctgtctgatcctcccaataaccgtctcttagttaaggagagcagatacacttattcctacactgcagatgcagaaatcaaggctcaagggagataaatggcttacccaagagtatatggctgtcaactagcagaactttaaataaaacacaaattttctgattcctaggccagtgctcttcctaccatgccatatgtttttaaagtagtatgtatttaacttctggtacttcctatgactatctcttgcctgaataaatgggaagataactatgtattccattatctcttgcattcacccatttccctgaagttttttatttaaaaccttctctacaagctttatgacctcaacagcccaatgccattctgtttcagaagtctatctttcctataccagttttacctctggtaaaattctcctgtatcactgtcatatacatgaattgagagaatttggaaaaaattttcagaatctgatcgtgaaaattgcaaacacatcaaagattagagaatcagggcataattcccctgcctagcagttcaaatttgaactccaggactcttttacatttgtctcataaccactgttaagaccttccctcatcgaacagaatatctgttatttcctattgaggaaaaaaattattactgtacacaaatttcacaaagtagcttagaattaaatctgtttatctaaattaactctaaataaacttgcttttatgtaaactaataactatagatttaatgtttttataatgaccctgctaggaatataggctgagacagtgattgaaatatacctcattatacatatatcacttgtttaccacaaatataattttaataatttcaaaaaacttttcttttgtgaaagtatttttaaaaattgttaatttctgtaattttgcaatttttctatttcttatgtagccaaacacatttacaaaactatattcatttatatgacataaataacttagtagcctttgttgcatataataggcacattccaagacaactcaaaaaagggcaataaaattataaatcactttatgtcataaaatataacaaatatagcaataacaatatctctatgcattaacctaatgcttgttttataaactctcatcttctctacctaccagaaactctcttttgcatattcattagaagttcaatatcaaagtataattacataaaatgttttcttactaaaccagaacacccgctatttttgagttcctacaactgcaagttcttataagcctgtgcatttgtctgtttgtgtatttatgaagagtttaagaatgtgaaggtgtttttattcggaattttaaagcaatgtcattggcccccttaaaatgaacatattttcctattatctacttaatcctagcaacatgctagtagctttattcatttcatactgaacagtgaaataacaatattttctctgataacacaaaaaaccaaacgactatttgcttcttcagttaatataatacacaaatattaaaaattttgtccactattggatcttaacattatcttgcaaattctactttttgtgtgtgctcatttcccacttaaactatcattgctttttaagttgacgcctaaaatatctattaagccaaactgatctacccacagagctttctgcagcagactctgatgctgacatctcaacagtttcctgttcctggtatgtttttccccccttgtttccttacaacagtataataaagaaataataggctttaagccaattcaaaacttaccttgcaaatctggaaatactccgaagtcaaagtttcctgaatttcctctctgagaacccctgcagtccccgccggatgtacggaaccacttccagccccaccaccactgttactgccactgctgctaccactgccaggggaggaggcagttaagccatccaaaacttttcggaaattaaacttcttcattttaaacactgttgagaaatacaaaggaaaaaaagggaaagaggtgacttaacacgtgcaattagaccttggtaaaagcctttctcttttcattagtcaagtcagtccccattttatgagcattggttacgaccgactggaaaaaaagagtcaggattcgttttgccaaattttaattctaaaaagcatatcctttttaaaaaaagataaatataacacaactccaaaagcaacagtattccctcctcacacatcagattttcaaggactgtatccccagctgtaactacgctttatcagcactggggtaaaaataaaaggcagtgtcatcatcgtcattagcattatatcatcattattatacaatcaaaccagagttcaacagaccaagactctgtctctctcttaagggcggactttccttcttcgaaacgttcggctcagagtattttattttcagaaaaacgacgttgggggagccggtatttactctgccaccaccttccgggctcttcccccatcagcttcaacgcttccttttttgtcactatgaaaggcggggaggggggtactttttctagtccccatcccccagcagcccggaccccaaaacatctgcgagtgacccacagcaacagctgccggggagggggggaggaggagaacggcgacaccgtctgtttccacttgtccctccgcctccccctcacctccccctcatctccctccccgcgtcctctttcccccctctccccatctcctgctcccctccctccacctctgcccgcagccgccgccgcgctctcccgcctgttcgcccgcccgccgtccgctctccccgctgcacggcagccgctctcgggggacgtgaagcggtggcggcgacggctgcggcccgagtcccgcctcagcctgctgggcgcgcagagccgccgctcccgctgtccctcccccaggcccagcgctgaggcgcggggctctcgcccgcccgcgggcgcgcgaacacacaaacacctcacgccgaggcattcgcgctcccagccagaacacacacaaacaccctcacacgggcattcgcgcgctggtgcgctcgctctctgtctctgtctctctctgtctctctctctctcaaacacacacacacactcacacagacacacacaggtgcgagggagccacagctggacggcggcagcggcggcggcgtcccagagggatgactatctgacccaggacttaggcaccttcctcagacgcctctagccgcctgccagcccgggaagctgagggggccgaggtaggcgggctccggccgcttctctgggccctctggtcgcggcgcctggcgctctccgaggtcctaaccgagcagtcaggctccagagcaggctccgccctcccgccgtgggaggcaggccccgcccccgggccggcccctagcttgccccgccctgcttcttccccggcaaagctgggaggtgaagggggcggggtgcccggggacgtcaaagggcgggagtagcttcggcgccaatcctagattcgatagggtaagttctgtggtctccagggcagaagaaatctgtggataggccgaaggtaaagccaatgacagtgggaggggggaatttagagaagtaggtgaggtatttgattgacagcggtattggccagtatgctgggggtcgtgctctgggggatgtaattggcgctacctgttgaaggactcaagtgtgaatcaatagaatgcctgcaagcgtgcgaatttggacgcctggagtctgaggatgcgggaagcgttgcttaccttaggtatggctctggacagtatggtgaactgagcaagtgttttgcaccttttcacttctgcgagcctcttcccggtcttcaggagcatctatctggctcccatcactctcctgctacctgcactcaacttgtatctgtgattaacccctgctgttaccaataatggcttaatggttcgtatctgccaaggagaattgtatttcaacagtttcagaatatatagccttctagagcctaaggaattgattgcttaccttgctctctagtaagtagaattactccttccccatcatcctcacatatacaaagatatttaatttctttaaagaaatatttctcactctgtaaaccgtatcaagaatatattttaagctatttctgtgagtcacaataatcattttgaaagatgtattattcagtgcagaaaaaaaaactgtatcaggatagatttggttctgagccctcacctgctattgacttcgggaaaatttggaccccgatgtctttgcgaaatgaatggcagttcagcgggtcacagctaactgagacttcaatttgggcatcacaacagaactcattagtgatcatttcaaatattgtcttacatcttacaatctttgacctctttttttcttttcttctttttcttctttttcacctctcctcttctctctctctcttttctctcaatcaagggagagagtgggaaggaggaagcaggagacttgaaggatgatgacttgtccaaggacatagcaaagaaatggtaaagatgaaatagagctcagtttttcagatcctcagctcaacgttgaatctttctgtcctgaatgactatttcactccttttgggactccctacactgctggtagtctctcattgccacagctagacagtaaccttcttgaaggcaagcatggaattgtatatttctcctagattatttagcaccaggcacaatatttcacttaaaataggcacgtaaagggttctgaagagttggtttattaatattttttattaaagatatatgagttggtacccaattacataatgtttgaaaggggtaaaaataatggtggaaataagtgatatgtctgacacaaactagatcttggtagggttccaaattctgtattgggtccctaacaacaggtatctttttactcttttccaccttttttcttctcttcttcctggcccattgctcacctcaaagtatggacgctagttaaggataaagagtttgctttccttgttttatgtctgtcttttctttttaaaaacagaggcaaggagggttataataaagtggctgagttttcatttttctaataaatgaaagcaagcctatagcaagtagtggtttgacattttgatgggagcgaagaaggagaatagccccaattcagcaaagtgagatgtaatgtttgcaaacaaaacctcttaaactgatcatcactagcaccatattatcacaaactaaatgatggtctttattctaaaaattgggggagagctgaggaaaaaagtacacaaaagattgacagagatccttcttgaggaccctggagagaattcaatggactgcctgagttagatgggacaacaaataggtataggaagtgggagaaaagccaagtcaaaatgtattcatgtttccaaataaatattggaagcctaaaaaaatatgatcattaggatgcttagattgtggactatttgggattatttcaaatatctgtgttcctccacagtgaatagcataatgtcttctacatagtaagtgcccagtgaatattaatttgaatgaatggcagcaagtaaaaatcataacataattgcagtctcagagagcctgtgcacacaggatattgtgatgccaattcacaaactgtgagcaaaggatagaattaagcaagaggcagagtacattgtgtgtatgaggagacagcagaaacaatagcctaaaaatcttactaggtgagagaagcataatgaaatatctatggaagtaaatttcatcctggattaattaaaaagcaataagatgttattttataaaccatctattaacagcaatgagaccagaccacagcatatattttataaataatgtgagaaacttcagagttggatcgggtaataataatgatgaccccttatcattcactgcaaactggaagaatactttgtggagaggaatggctgaggtacagcttctgaataaggcttgatttcttcctaaaatgacaagtatgaagaactgcaaaaagaaaaatactttcagcttgatccatggagcaaaatcatcaaagcatttaaataaatctactacatcagaaggatttttaggatgtgtgttgaaaatatgttacaactcactttaagtgttcgtgattttggactcaagccaacaatgaagctaagagaggctgcctttccacacctgcaaaataattaaataattgtagaaagtatgtacatgtgtggcacttcacacagagaagaaaatttaactggctagggttacagaaaactaagcaaaattgacaaaaccatatgtaaataatccattgtatatagagataataataattctaccagttatttagcactacgtcaaacattgtactatgaactttacatacaactcttttaacttgatccttattataactctataagataggtattgtccccattttatgaaagaggaaatttggagctcagaaatatttaagaaattcacccaaggtcacttaggtggataatccagtcttcgaattcaaagctgtctaacttctaagatcatgctcttaatcggtgccttattatttgataccatttagaagattaaatagaaactagaatagaaaaaaaggtggcgggtcaattctccacctaaaatagtgattgtatgtgtattagtctttcaggactgccataacaaaataccatagactgggtagcttaaaaaacaggaacttagcacagtttgggaggctagaaatccaagatcaaggcatcggcagatttattttcttctgaggctctctcaatggcttgcagatagtcaccttctctctgtggccttacatggtcttttctctgtgggctcacatccctcgttgatttctccatgtgcctaaatttccgcttcttataaggctcccagtcagattgtgttagagtccaccttcatggcctcattgtggcttaatcaccttttaaaatatcctatctccaaatatgcttccattctgaggtactgaaggttagggctttgacatatgaattttgggaagacacaatttagcccatgacaataagatcatcaaattcaacatcctttgaggagagcatctactatgagctggaattgtgtttaaaaatttacatttattggccgggcgcggtggctcacgcctatgatcccagcactttgggaggccagggtgggtggatcacgaggtcaggaattcgagaccagcctggccaacatggtggcctgtctctgctaaaatacagaatttacctgggcacggtgacaggagcctgtaatcccagctatttgggaggctgagacaggtgaattgcttgaacccaggaggcagagtttgcagtgagccgagatcgcgccactgcactctaacctgcgtgacagagcgagactccatctcaaaaaaaaaattacatttattttctcatttaatcctcacaacaataatgtatggtagctatagataactccattttacaggtaaaaaactgaagcaaagcaaggttaagtaataagcccaatatcatacatctggtaggttttgaaacaagaatttggactaatctcaatcttactccaaagttctttcctcacgctagtagttttctgttgaggacccagagaaatccctttataaaggtgttttatattagaaaagttaattatgacaaattcgagtattaggttaaaacaaaacagaaaaaaatggaaaatatctcttcaggaatttggatactagaactaaaaagacatttgagagttcatgggcactgagtactagaaatggaagactttgggaacggcaagctaatgggaggttcttatctcacaagaaatctcagtataatttgaaatacattaacagagtcgcaggggagtaccccatcaaaattgaagaaaatcagttatcaataactaattagatgtagtaaggcagtattaatttgctgagaaaggctgtagtctgagtgactatcagaacagctggaaggagaatttggatggagggagaatgatgacataatacttaccataaggtggggctggcaattgtttacattagcaaatgcgaacatttccattgtgcgtgctgtgagcttctaggtcctggcatgagcaacctaatttgtcactcacttctgactcttcaatcaagttatagcagtgtccttattatttgccggtttaaaagttagaatttcagtaagagaacatagctaagtaaacaggttccacctatatcctttctggcaaatttttccagaggattaggaattacctttccttcctaagttttcatctaactcttttctgaccctattatacatccttcaagaggagtactggttaataattgtcagctttctattatatggcaataaataacaatcagcattaaaacccttattcctagtccaaatccacaaaggaaaaaccacagggttaattagataatgtcatagctgtcatgggtttcagataaacaggcaggggtcattaggatagaaccaagacacaaaatatggctcagcacacaatcaataacagaatagcaaatagttttgccctgctaggggcaaaactcaaatatttgctgttaaacatgtacttaaaatcagctctttgtgcatattctaaaataattttcacatattcatccatcacattgtgatgtggtaagaaaaaagatttagtgttgggacaggcctaagtttactaactgttgcactaacaagcacttttagcctctaagcctcaatttacccttttatatgggaataaatacagggtaatataagaaacaagtgaaattatgtatataaaagtgacttgtagaatgcaaaccactaataaataatattgtcatcatttccattatttggtactttagtaaaatagtttataggaattggctttagatttgaatttatgttcccattactattaatacgaaattcctttgcatctgtggattgactatagctgaaattgagaaaaaggaagaggatttggactaggtgacttttaaggttctttccaatcaaaaattctgtcttcatatgatttgtttagtcaagattcactaccatctcttcctaaacactacacagacttattgaaaggtaattaaggggggtggagccaagatggctgaataggaacagctccggtctacagctcccagcgtaagcgatgcagaagatgggtgatttctgcatttccaactgaggtaccgggttcatctcactggggagtgccggacagtgggtataggacagtgggtgcagcgcaccacgcatgagccgaagcagggcgaggcatggcctcacctgggaagcacaaggggtcagggaattccctttcctagtcaaagaaaggggtgacagacagcacctggaaaattgggtcactcccaccctaatactgcgcttttccaatgggcttatcaaacggcacaccaggagattatatctcgcacctggctcagagggtcctatgcccatggagcctcgctcattgttagcacagcagtctgagatcaaactgcaaggcagcagcaaagcttggggaggggcgcccgccattgctcaggcttgagtaggtaaacaaagtggcagggaagctcaaactgggtggagcccaccacagctcaaggaggcctgcctgccttgtgggctccacctctgggggcagggcacagacaaacacaagacagcaataacccctgcagacttaaatgtcctgtctgacagctttgaagagagtagtggttctcccagcacacagcttgagatctgagaacaggcagactgcctcctcaagtgggtccctgacccccgagtagcctaactgggagacaccccccagtaggggcagactgacacctcacactgccgggtactcctctgagacaaaacttccagaggaactatcaggcagcagcatttgcggttcaccaatatctgctgttctgcagccatcgctgctgatacccaggcaaacagggtctggagtggacctccagtaaactccaacagacctacagctgagggtcctgtctgttagaaggaaaactaacaaacagaaaggacatcgacaccaaaaccccatctgtatgtaaccatcatcaaagaccaaaggtagataaaaccacaaagatggggaaaaaacagagcagaaaaaccagaaactctaaaaatcagagcaactctcctcctccaaaggaacacagctcctcaccagcaatggaacaaagctggacggagaatgactttgacgagttgaaagaggaaggcttcagaagatcaaactactctgagctaaaggaggaagtttgaaccaatggcaaagaagttaaaaactttgaaaaaaattagacaaatggataactagaataaccaatgcagagaagtcttaaaggacctgatggagctgaaaaccatggcagaagaactacatgatgaatgcgcaagcctcagtaaccaatgcgatcaactggaagaaagggtatcagcaatggaagacaaactgaatgaaatgaagcatgaagagaagtttaaagaaaaaagaataaaaagaaatgaacaaagcctccaagaaatatgggactaggtgaaaagaccaaatctacatctaattggtgtacctgaaagtgacagggagaatggaaacaagttggaaaacactctgcaggatattatccaggagaacttccccaatctagcaaggcaggttaacattcaaattcaggaaatacagagaatgccacaaagatactcctcgagaagagcaactccaagacacataattgtcagattcaccaaagttgaaatgaaggaaaaaatgttaagggcagccagagacaaaggtcgggttacccacaaagggaagcccatcagactaacaactgatctctcagcagaaactctacaagccagaagagagtgggggccaatattcaacaatcttaaagaaaagaattttcaacccagaatttcatatccagccaaactaagcttcataagtgaaggagaaataaaatcctttacagacaagcaaatgctgagacattttgtcaccaccaggcctgccctaaaagagctcctgaaggaagcactaaatatggaaacgagcaaccagtaccagccactgcaaaaacatgccaaattgtaaagaccatcaaggctaggaagaaactgcatcaactaacgagcaaaataaccagctaacatcataatgacaggatcaaattcacacataaaaatactaatcttaaatgtaaatgggctaaatgctccaattaaaagacacagactggcaaattggataaagagtcaagacctgtcagtgtgctgtattcaggaaagccatctcacatgcagagacacacataggctcaaaataaagggatggaggaagatctaccaagcaaatggaaaacaaaaaaaggtagggttgcaatcctagtctctgataaaacagactttaaaccaacaaagatcaaaagagacaaagaaggccattacagaagggtaaacggatcaattcaacaagaagaactaactctcctaaatatatatgcacccaatacaggagcacccagattcataaagaaagtccttagtgacctacaaagagacttagactcccacacaataataatgggagactttaacaccccactgtcaacattagacagatcaatgagacagaaagtttaacaaggatatccaggaattgaactcagctctgcaccaagcggacctaatagacatctacagaactctccaccccaaatcaacagaatatacattcttttcagcaccacaccacacctattccaaaatggactgcatagttggaagtaaagcactcctcagcaaatgtaaaataatagaaaccacaacaaactgtctctcagaacatggtgcaatcaaactagaactcaggattaagaaactcactcaaaaccgctcaactacatggaaactgagcaaactactcttgaatgactactgggtacataaggaaatgaaggcaaaaataaagatgttctttgaaaccaatgagaacaaagacacaacataccagaatctctgggacacattcaaagcagtgtgtagaaggaaatttatagcactaaatgcccacaagagaaagcaggaaagatctaaaattgacaccctaacatcacaattaaaagaactagagaagcaagagcaaacacattcaaaagctagcagaaggcaagcaataactaagatcagagcagaactgaaggaaatagagacacaaaaaacccttcaaaacatcaatgaatccaggagctggttttttgaaaagatcaacaaaattgatagaccgctagcaagactaataaagaaaaaaagagagaagaatcaaatagacgcaataaaaaatgacaaaggggatatcctaccaatcccacagaaatacaaactaccatcagagaatactacaaacacctctacgcaaataaactaaaaaatctagaaaaaatggataaattccttgacatatacactttcccaagactaaacaaggaagaagttgaatctctgaatagaccaataacaggatctgaaattggggcaataattgatagcttaccaaccaaaaaaagtccaggaccagtggattcacagctgaattctaccagaggtacaaggaggagttggtaccattccttctgaaactattccaatcaatagaaaaagagggaatcctccctaactcattttatgaagccagcatcatcctgataccaaagcctggcagagacacaacaaaaaaaagagaattttagaccaatatccttgatgaacattgatgcaaaaatcctcaataaaatactggcaaaccgaatccagcaacacatcaaaaagcttatccaccatgatcaagtgggcttcatccctgggatgcaaggctggttgaacatacaaaaatcaataaacgtaatccagcgtataaacagaatcaaagacaaaaaaacacgtgattatctcaatagttgcagaaaaggcctttgacaacattcaacaactcttcatgctaaaaactctcaataaattaggtattgatgggacgtatctcaaaataataagagctatctatgacaaacccacagccaatatcatactgaatggacaaaaaccggaaacactccctttgaaaactggcacaagacagggatgccctctctcaccactcctattcaacatagtgttggaagttctggccagggcaatgaggcaggagaaggaaataaagggtattcaattaggaaaagaggaagtcaaattgtccctgtttgcagatgacatgattgtatatctagaaaaccccattgtctcagcccaaaatctccttaagctgataagcaacttcagcaaagtctcaggatacaaaatcaatgtacaaaaatcacaagcattcttatacaccaataacagacaaacagagaacaaaatcgtgagtgaactcccattcccaattgtttcaaagagaataaaatacctaggaatccaacttacaagggacgtgaaggacctcttcaaggagaactacaaaccactgctcaatgaagttaaagaggatacaagcaaatggaagatcattccatgctcatgggtaggaagaaggaatatcgtgaaaatggccatactgcccaaggtaatttatagattcaatgtcatccccatcaagctacccatgactttcttcacagaattggaaaaaactactttaaagttcatatggaaccaaaaaagagcccacattgccaagccaatcctaagccaaaagaacaaagctggaggtatcatgctacctgacttcaaactatactacaaggctacagtaaccaaaacaaaatattactggtaccaaaacagagatatagaccaatggaacagaacagagccctcagaaataatgccgcatatctacaactacctgatctttgacaaacctgacaaaaacaagaaatggggaaaggattccgtatttaataaatggtgctggaaaaactggctagccatatgtagaaagctgaaactggatcccttccttacaccttatacaaaaattaattcaagatgggttaaagacttaggtgttagacctaaaaccataaaaaccctagaagaaaacctaggcaataccattcaggacataggcatgggcaaggacttcatgtctaaaacaccaaaagcaatggcaacaaaagccaaaactgacaaatgggatctaattaaactaaagagcttctacacagcaaaagaaaccattgtcagagtgaacaggcaacctatagaatgggagacaatttttgcaacctactcatctgacaaagggctaatatccagaatctacaatgaactcaaacaaatttacaagaaaaaaacaaacaaccccatcaaaaattgggcaaaggatatgaacagacacttctcaaaagaagacatttatgccgccaaaagacacatgaaaaaatactcatcatcactggccatcagagaaatgcaaatcgaaaccacaatgagataccatctcacaccagttagaatggtgatcattaaaaagtcaggaaacaacaggtgctggagaggatgtggagagataggaacacttttacgctgttggtggaactgtaaactagttcaaccattgtggaagttggtgtggcgattcctcagggatctagaactagaaataccatttgacccagccatcccattactgggtatacccaaaggagtacaaatcatgctgctgtaaagacacatgcacacgtatgtttattgcggcactactcacaatagcaaagacttggaaccaacccaaaagtccaacaatgatagattggattaagaaaatatggcacatatacaccatggaatactatgcagccataaaaaatgatgagttcatgtcctttgtagggacatggacgaagctggaaaccatcattctgagcaaactatctcaaggacaaaaaaccaaacaccacatgttctcactcataggtgggaactgaacaatgagaacacatggacacaggaaggggaacatcacactctggggactgttgtggggtgcggggagggggaagggatagcattaggtaatatacctaatgctaaatgacgagttaatgggtgcagcacaccaacatggcacatgtatacatatgtaacaaacctgcacgttgtgcacatgtaccctaaaacttaaagtataataataattaaaaaaaaagaataaagtgccaacttgttaaaaaaaaaaaaaggaaaaggtaattaaaatggtatccatgtaggtactggccaacagagctgaactgtagcccacagtagacaaaaaacacacaaattctcaaaagtgtccttctaccaattagagatttctggagatcacatttttattaatatatttctatttacatctgtgtacatttatatctgattataaaagtaaggtgcatgtattagagaaactttagaaaatctagacatctatttctagtcctttttaggacctttttaaataaattggaagtgtctaatatatactattttgatttctttttttaactaacattttgttgtaagcattccccatttcattaaatattcttcttcagacacatcatttttgaatgccaatattatgtttaatcatgtaattattccacaatttatttaatcatttccatattcttgaatattttatttttttctaactttatactattataaataataatgaggataataccttcatactaaatctttggtaaagtttcagtattttaggggatattactatgtcaaaataatatgtcttcatttgtaattctaaattttattattaagaggttgtgcaaatttataccctcattaagaggttaggtctctgtggagagctcgtgttacaagggacttttgtaaagtgaaatcccataccacctacattgatgttttcatttagatgttgacaaaattcagagagattttaaaatgataagaattcctaagcataatcaactaaacagaacagaaaaacgtggcaatgtaaaacatgtgactgcatgtgatttcagtttggagggaggaactataaaagttttcatagaactttaaggctagagagaagcttagtaatctctaagttttacttctaaattttaaaagtgatgacacaaactttcatccaattttatcaaataagaattgtagttttttgtgttattgttatttgaggggaaaatgagaaaataagaacaaggacagctgaaagggcagagaaagaaatatagatatatctacagaaggagaatttcatcttaaaataatactagagacctttaaaaaccagttttggtttttgcaatgatagacaaaataaacagaaatatgaacccttgaaatttttattcacactgaagttgtgagcaagattcaggccatagaccatagattctttgatcctgatctagatgaaaaaaactacaaagggatgtaagcttttcttgggtttggaatatggagacaagaggaaacaatttcttttagacctagcctctcttgtttcctgaaactttaattcatcatgactcatgaagattgcaccagtttaagtagggatatatatttattttcgtgatggtaataacaaatttaataatgccattactgaattaatttttcttaatggctaacaaagggttataatgttataattttgtaaatggccatactaattattagctctgctaaaactggcacactggagtttcagacaataagccaggataccagcatgactttgctttaccataagcagaagttcaaacacacggtcatgagggtaagaaaaaggatgagtgacttcgtgcctgtctgattgcagactctaaaacaagaaaaccttttaaatgggtcctctctggctatgaaggataaactttctgttctaatcagctccttggctggctcgggctgacaaaacattattgttctcttaacctttgccaagctgaggaactttacaagcattttttcagtaacagccagagtgatttatgggtttttctccctctagctctccgtggttagaaaaacaaattttatttctcagtctcattccttcctccccattattcccagttctctactgtctttagccataatccttctttatttaatgcaaatattactttattttgcatagtttttaagtatgtctgtgtctaatgttctttaattatggagaccaaatatcttgaattttctggaacagtttctatttaaatattgtgtacctctaaatatactaagactttaaattaaaaaaaaaaaatctgtattattgttttcctaaaccatgaaaaaacatccagtttctcaacaaataccactgttttccataaggccgtttttaagtttgagcggcaaaaccttgaggggagacagatacatgatagtttgtttttaagagcaaaatctctggtttcaggtagatttgaggctgccacatttttggtgtgtgatgttgggcaagttacttaacttctctgtgcttcaattttcttatcgaccaaaggaatataaaattaccaacctcatgagattgttgtaaagattaagtgagagaattcatgctagcactcaacactgcctggcacataggacgacttccataaatgtttgctactattatttttcagcaccagaagtctcatatgaatattagtgattataaaagaattgaaagaaaaaagtgttaattttactatgcaaagtaaaagaacttaacatgaacattataaaatactgtttgttatgatttggaccttgggtagtatgtacctggatatttgtaggttgctaattacctagtcatctagaaaggaaatctcatttagaaaggaaatctaagaaactataagctgcgtagattcagttggggagacacagagtgataaatcttggaaaagtaggtaattaactcagtcatgttatctgttaaaggaacactgtggccttaagttgt

SEQ ID NO: 49 - DNA, 57810 bp, Homo sapiens
tctggaagggccaggctcctaagtcatggtgcaagtgtccccaagggcttacctaagggcgaaatgacttcagaggccaggaagacaccttctgcaatatctgaaggctattggctgtattattagaaagggaaaggcgtaaaagaattggaagtgtggagaaaaaatgctggcagtcagcgttaacaataaactcaggctttttggctgggcacagtggctcatacctgtaatcccagtactttgggaggctaaggtgggtggatcacctgaggtcaggagttcgagaccagcctggccaacatggcaaaaccccgtctctactaaaaatacaagaattagctgagtgtggtggcaggtgactgtaatcccagctactcaggaggctaaggcaggagaatcgcttgaacctggcaggtggagttggcagtgagccgagatcatgccactgtactccagcctgggcaacagagtgagactctgtctcaaaaaaataataaactcagacttttcctggtttgggaagaggagaaaagggggctgaatgacagaataaaaatagggaggtgtctagaaggcagtgccacacaatattaaggcaggagtctgttagaaagctgtcaggggatttttaaaaatagcttttatatactttattgctggaattttgatcatttaaaagattttataatggggaaaaaacaacgatctaactttatagggaaacaaagaagacaaaagagagcaggaatgcaatgggagcttgaaaatgagaggagagttcgagaccagcctgggacacgtagcaagaccccatctctacagaaaaaaaaaccatgtttttaaattagccaggtgtggttctgcacacctatggtaccaactactcgggaggctgaggtgggaagatcgcctgaacatgggaggtcaatactgcagtgagctgtgatgatgccactaacctccagcctgggtgacagagcaagtatccatctcaaaaagaaagagaggaatgaaggaagggagggagagagggaaggagggaaagggaaaggaacagtgactgagaagggctgggagtggacgtgcaggggccagtcaggggtcaagggtcaatacagtgcttctgttccgaatgaccaaacatacttgttatggactgtgtccccatcaaaattcatacactgaaatcccaaccaccagtacatcagaatgtgaacttatttggaaatagggtcattgcagatgtaattagtccaattaacatgaggtcattaaggtgagaacaagtccaatataaccagtgtcataaaaagaggaaatttggagagactcatacagtgtgcagggagaaaagcatgtgaacatgaagatggccacctacaatccaaggagagaggccaggaacggaggcttccctgaaagccctagagagaaccaaccctgctgaccatttggacttctggtctccagagctgtgagacacatttctgatgtttaagccacccagtttaaagtttgtgtattgtttgggcagccctaacaagctagtacacacatcagcagaaaccgtggttctgaccttgttaagcagacaacgtggcacaggctttttttaaatttttaccttttttttcgagacacggtctccctctgtagcccaggttgtagtgcagtggtgccatcagagctcactgcagccttgaactcctgagctgaagtgttcctcccacctcagcctctcaaagtgctaggattatgggcacccggcctcccaacttttttcttttaatgattggaaaacggcaccacggttgcatgtgcaggtcccatgtacccattcccctgctaccggcactgtcagctgctgcagactcgcagttgtagctcatggctgcattcttcactggaaatcagcatataactgtgtccatcactgggaactagcctctgtcacagggacggcttgcccaaggttatgcctccttgaaaggagtggcctgtagccaatgactggctaatgctgggataaagtcccagctgtcctgtctcagtttggttcaactctgaagggccatcccagctccagaactcccatacaaaccctaggtggtgccaatagttcttgcggaagtggtaaaaatgacagcttcagcagttacacgcacaatactacatgattaatgataactgtggagttgatcactctcttcaggtttgtagggtttttaaatttgaaaataacagtgaacaaaaattttaaaagtgctgaagacacagagcttcacagaatgttttgtgtctgggttttccatctgaatggaacttcctataggcaattcaaaatgtgggtgaaatctgagtgatgtactgtaggatcatggggaagagaccggatccagagccagcctgccgggctacaatcctaactctaccacttactcctagctatctataacaatttttaattttattttaaaatattttaaggccaggcgcggtggctcacacctgtaatcccagcattttggaaggccgaggcgggtggatcacctgagatcaggaattcgagactagcctggccagcatagtgaaacctcatctctactaaaaatacaaaaattagctggacgtggtggcacacacctgtaatcccagctacttgggaggctgaggcaagatagccgcttgaatccaggaggcggaggttgcagtgagctgaggtcacatcattgcactctagcctgggcaacaagagtgaaactccgtctcaaaaaacaaaaattaaaaaaatatattaaatatttttatttaacatagagatgggtttcaccatgttgcctaggctgtctcaaattcctgggctcaagtgacctgcccaccttggcctcccaaagtgctgggattataaggtgtgagccaccccgcctggcctatatgaccttcttaaggtctgtaaaatggggccatgagtctctatttcataggatggttctgaagattgagttcatgtagaagactaaacaggttactaaccaaagcccttgaacagtgccagaaacagtgttgcaatggttgcatgatcctgcagtcccctagctgggcaatggaacttccttgctgctattattatacaattacagtaatgttggtcttctcattcatgccacaatacagcacagagcttacagttaaggaaataggagtcctctgctttttaaagaggtcaacatcagttcagttttcttatcacccattacccatccgggcctatggccataagtgtaagaacataaagattgaaggtcaaaccttgaaatagctaaaagatttgggtcatatagataaggcatatcaagagatacttatttgaccccttgaaaggcttgacattggtaaccttgccacacctactacttcactcctctaataccttaccttcaggaagggtccttgctgcttttcctaaaagatctcttcactttcgacttaaaagatgtatataaagacctgcttttcccatgtcttagcttgaggttatatacacaagaaaagccaacgattagtttctaccttgaatgaataaaggcctaggaacagagagattcaaagcaaggattttactcaacacttcattaccagcaactctattccccttatgaaatttacaggcggaactaaaggtcggaactaagttattagtagtataacccattgttactctgggaaacttaatccccattgcaacggtgttgagaggtgggctcattaaggggtgattatgtgattatgtcatgagggctctgccctcatcagtagattaatgtaattatctcggcagtgggtcagttattgtgcgagtgggcttggtccccatcttgctctcttccccttctgccttccaccatgggatgacacaagagggccctcaccagatgtgggcccatcagcctcggacttctcagcctctagaactgtaagaaataagttcctttatatacattacccagtctgtggtattgtgttatagcaacacaaagtgaaccaagacaccctaccatctgacaattcacaagctgcaacccttccacttcctcaaactgtgggtcttcttcaaggtaaagtgctacattgattgtaatatttgtgtatttctttaccatttaacgcgtgcaaactgtactccatttttaattagtttctatcagttttgtaatgttgcactgacaaagtttgagtgctgtgcctgaaccccattttttcaatttgtacaatttcacatagtgatttttaggaaagcatatgtcaagttatagcaatacataaaagggagtggtagcatcatgccaattggaaaggacagcaccattttcctcctcaatgtgaacttctcataagctctgcactactattcccttccctgactgacctcctatacattggtcccaaatcctcagtcatttggggcaatatgcagctaatgttacctaaacccttttttaacatttaaaaatgatgtctgtcgggcgcggtggctcacgcctgtaatcccagcactttggggggccgagacaggcagatcacctgaggtcgggagttcgagaccagcctgaccaatatggagaaaccctgtctctactaaaaacacattagccaggtgtggtggcgcatgcctgtaattccagctactcgggaggctgaggcaggagaatcacttgaacccaggaggtggaggttgcagtgagccgagatcgcaccattgcactccagcctggtcaacaagagcaaaattccgtctcaaaatacatacgtacatacatacatacatatatacagtctttctttggggatcactaaagttctcttccctcctctagcaagcttttaaagtgttgtttatattcttgcctccagcagaatcatagaattaggaaaggagaaaaccaaactttgaaaatgctcttacttcatttctgttgataatctaacagtatggaaggttaggtttaaatcacgaagtaatgaaatcggaaaggcattactgggcactaaacatagagaaaatgccttgagtgcattgagacaggtttgttgtgacataaaaacaccacagagtaggcagggcacagtggcttatgcttgttatcatttgaggccacaagctcaagaccagcctggccaaacatggcaaaactttttttttttttttttttgagacggagtctcactctgtcacccaggctggagtgcatggccgggcaaaactccttctctactaaaaaaacaaaaatagaaaaattagctgggtgtggtggcacacacctttaatcctggctattcaggagactgagacagaattacttgaacccgggaggcaaaggttgcagtgagcagagatggcgccactgccctctagcctggtgacagaaactgtttaaataaaaatttaaaaagcacagaatatatatgtttcaaagactattacctaacttacaagttaaaagcatcccaactcattacgtttagaaaacaagataggctgggcgaggtggctcatgcctataattccagcactttgggaggccgagacgggcggattacgaggtcaggagattgagaccatcctggctaacacggtgaaaccccgtctctactaaaaatacaaaaaattagccgggtgtggtggcgggcacctgtagtaccagctactcaggaggctgaggcaggagaatggtgtgaacccaggagacggagcttgcagtgagcccagatcgtgccactggactccagcctgggcgacagagcgagattccgtcacacacacacacacacacacacacacacacacacacacacacacaccacttaaatgcagaaattaaaactctatttctgtatatcactatggtaaagggttgttggttacctgtaccatcaatccacaaaaggtataaaacttcatgtattattcttattatcttgtgctgataccagagtacctttaaaataccacccaaatttagttccgagaggcagatggagagtttggattgtctccaaaaatctaaaaggcccttgttttgacaattaggtttacgcatgtggtacatattgaggggcacataatcactggtggattggaaatgcatacctatccttgttccttccctaactaaaacggcatttaaaaggagcgaaactcaccaggatggagaaatcgagagattaaaaaaaaaaagcaagctagaaaatggacagattagtttataatttagcagcttcaggaaatggaataccaaggccagcagtgggggcaaaaaaaaactcagaaattaaaaaaaaaaaaaaaaccaaaaaaaaaaaaaaatgaaggacttggcagcagtccaaacccctggaggtgggggcaaaataaggattggatgaatctgtctaaccactcaaatcccagatccttttccctacactgcacagttgggcaacagccctctctcatttgttcattctctagaaaaggtagcccagtctctgggatggcaggggtgtgttacactgaaagcagaggcccaaccctcaccctgctgggttctagaatgctggtagacggtctatcacccttcaggcacgatacaaattgattgagaatcagctaagaccttgacataatggcataaaaattccctaaccaatcatatgtcatacaaagttccctaactaatcagctgggacagatcattttttcagtcgacaaactgcactcatgcactcagagctgcctgttggctctttagtccccactcagatacagggaatgcttagaatcgttaagatttacagattataaaacaagacaatttaggcagggcacagtggctcacgtctgtaatctcagcactttgggagggcaaggcaggtggatcacctgaggtcaggagtttgagaccagcctggtcaacatggtgaaaccctctctaataaaaatacaaaaaccagacaggcatggtggtgatgcatctgtaatcccagctactcgggaggctgaggcacgagaatcacttgaacccgagaggcagaggttacagtgagccaagagtgagaccctgtctcaaaacaaaaacaagacaatttagattgtccagagctggaggaaaggggaccaaagtgatgaagggaaaaaagaacattcttagcgataaaacatattgttgcaaccttggctcagaagtttaaaattgcctaagtggaagacagaaggcttggaatagagctgagaatcctccaccccaccatacctggtgaaagcagagcaatttgagaaacataaaatagaaaatagatgggagaaaaccaatcaactcacagaactaaaattcttaaacttcagccaagtgtcccctcctctgcatattgctgctaaaaactgaatggggacaaagttgtaggcacaggtacgcaccagatgaagttgggcaccattatttacaaataaaggttagctggactctggggttaaaaataatctaaataagatattgcagtatctttagcacatctacacaacccctttgctctactgccaatgtgcaatcacttcatctgtcactcaatagcagatacttaactctttaattgcccataactgatccagtgctaatcttctcaggccatcgacaaatcaactgcaaagggttttgacagacataagcagtatcatggtagaatcagggtttgaaagaccacttaacaatggaattgcttttaaagctgatgacaattacatacataggtaaaggagttcaggcgtatgaaagatgttctttttctctccatttagtaccccaagaccacaaaaaatgaagcatgctgtgtagattaagctttctacaaattgccattaaaaaaaaaaactttttacagtctgtttccgataaataaaacaaaatcttcaactgtgtaacactaaagtcacattgccttttgagtctaggtggtttgtgttccactcctttctgggtgaagacatgcactatgatttagaagatatgtgtagtagaggccatctgtatgcaaagagaaaagtttctccggatgtctgagtaggaactgagacttttcaggttagctttaacttaatgcaaatgccagtaaagaccagaactagttcgttgcttgttcctaggccaggtttatcctcattatgaaagcctgctgccgtaattacttgcatcacacctttttcctctcaggatggatgcgattcataggatttactcacaactcaaatgtagaagactaatttttgttttacattttgattcctgccaatttaagtttctactattactgtgtttcttttctttttttgagatggagtcttgctctgtcacccaggctggagtgcggtggtgcaatctccactcactgcaacttctgcctctcaggttcaagcaattctcctgcctcagcctcgagtagctggcacaggtgtgcgccaccatgcctggctaatttttgtatttttagtagagatggcatttcaccatgttggccaggctggtctcaaactcctgacttcaggtgatctgcctgcctcagcctcctgaattgttgggattacaggcgtgagccactgtgcctggcctgtgctttaatactataaggttacattaaaattaaatcaactaaaaggcagcaatacaaaaccttctctgatgcccaaccaaaagtccaacttacaaggacaaaagagaatggtcaagtacatgctaaagagatcttaataccaagctatcaaccactggcagtatctgccatttgcatccatgtgccaggcactttcaaggcctggtaaggttaagttctagtgtcttcatcctacagacaagaaaccaaggcccagagcaacttgtccaaatcagtataatcaatctaataggtaataagggtcgtttattgagccctgtgtgccagccagttctaagcaccttgtaactgttacatccttataaccttatgaagctgctacttttactaccatcattttctttcttttcttattagagatagggtcttactttgttgcccaggctggagtgcagtggtgtgatcgcggctcactgcagcctccacctcttgggcccaagcaatcctcccaccttggccttttgagtagctgggactaccagctaattttgaatttttttggagagacacaggtctccctacattgcccaggctagtcttgaactcctgagctcaagcaatcctctcacctcaaccttccaaagtgctggcatttacgagcataaaccactgtgcctggccttaccacgattttccatctgggaaaaccgaagcacaaaagggttaggtgactagcctatgttcatacagacagtaaatggcagaggcaggatttgagtcaagcagactggaggcaaggtctacacctttaaccaccaccctatactagtgcattgcctgaataattaagtaaatctttgaatttaaagttactccccaaaatattaagtcacccagttaactaaagtgttcaaagaacaaagagatgatgcttttcatttcagcagagttcagaagacttcttaaggccaagacaggttaggaaactaaaatatatactctaaaaagaagaaaaaaggaattaagcaatgtgtggcttctctaacccagtatttccatttaatggtattaatgcccatatttacttggaataaatctagcttaatttgtcaatctattcatttagtccgggttttaaattgttaggaggctagtgaactgaagtgtctagaaaaggctgtcctggaaacagtgctcacatatatactggactttaccaaaatttcactgttctatatataacttccagcattttttagcagaatcaattttctttctaataaagcaagattgttaatacacataaagctgatatgtaaaattttacctctatttcagatagaagccaaagtaaaacatgaggaataaaaacatttatctatgtattcagaatcacacacaagttacctttacagttcaatttactatatagaaatcattgggttttatatttgcagttaacttttgaactgagattacaatattataacaaaaaactttacattaattcagaactttttagcataccaaattgaaatacataggttcaaatttcagatttatggcaaacagtcttcaaatacaatacagacatttcttaaaagttaccgtatcattcacatgtgatatttgcaactctgagctatttcttatagaacagctctcctgcagatatggcaaagttgatatgccatgaagttcaaggcctgtatagtcaagccaaggactcaaagttgcaccatctttaaaaaggtttggcatttctggaccacaacaatgcacaacatgtaaagaaggtaggaaacagttccccctccttgttaaatggttaaaaaaagttacatggtagcttggaattttgcataaaaccccataatataccttggaaaagtccaagggcaatttgatggcaatggattggggccctatatatatatatttttaatagaacccatgagatttaaatgggcattaatcaaatcaaaaaatattaagcacctactggtttaagagatttaaatttattagagattcatgatcaatttctttccacctcgaaatcaaggtgtaaaaaccagctattaagtgcattccaaacttctcctatgtagcacaggtagaattttctgtccattggcaccaaagtgaagtcacatttcctcttgggagacagaaattccacacctgaacacagagtaagttaggaaaaaatgacccctgttgtttattactattgtgattctgagatctaggatttctaatatactagcagtaaacaaagcaaattcctggcaacaactgtcaggttagtgatgctaactcccttcccccaaccaccataaaattttagtaagaaaagaattaaaagtaatgactaagcagaacaaattggaaataacaagaaactaaggggacagttcaaaccaacaacaaaaaatcctaaatttgaaatcactgcaactgaagataataagtgtgcttcaccccaacccccatcccaactctgaatttaaacattccgtgcaaaagagcaacaggtttctggataaagatgtagcccttctttaagttttagtgctctgcagttttctgcaattttatttccctccccccaagtttattcaaagtatttaacagaatcttccatttcagccaaaagattgtgattcaaagatttactaaggtactctatgcattctatctatacagaaacacctatttattattacagttgatttatgcaggattaacatttttggtgttaaaattgttaaacatcatgcttactgcacatcaactctccataatgaatctgaacttcacaatgatttaccaaacactttacttaaattactaattaaataaatgaaaaatgcaccgagccaaacaaaacttaactgggctataaagaaaaaaacccttcaaaacagtccatatacacatctatttcaaaactacctttgctagctagcccctttcccaaagttttagcctgaaaaaacagtaaaatctacacaaaattttattgcaatcatacaagggttacattaggtcaacaaatactatgatgcaattttacatttattaaactacagttcaaagcacaaatttacacattctaaatacactaaacgttatctaatgaagtcacactggtcttctaacatttgatatatctgggtgaaagacatgaactttacaagactttaaacacaaatccttagtataaaaactgtgttcttgtatgtaaacgatttaatggggaacccaattaatgggcttccatctccactaagtcatccattttgttgcatattttattttaaacgcttaaggggtaggacaaactggtaggtttaaatctggatacattatctaaatctcccattatccccaatgaattatagatgaaagctgattttgtctggtcccaaatagctattactaatagtttttgttgccaaaagaattaagagaataagattgtttaaattatttttccacactggaatgttgaccagacaagcttaacctgcaacttcagatctaaagaagcgttaatgcctgtttaagcttcagcggaaaagctgtcttcttggctcagctgaatgcaagaaggcacaaagaagaagttcttcatcattgagtctgaagtaattccagcatcttgcatctcatacctacgtagaaaaaaaatcagctaaattctcagtttaagcccaaagaccacgtaatcacataacaaatggataataaaacaggattataactagtcttccaaaaacctttaaaagatcatcatttttctatgatagtcatgcactgcagagtgatgttttggtcaaagactacacatatgactgtggtataccgtaaaattacagtgaagtttaaaaagtcctatcacctcgttacatcgcagcaatcatgtcatagcacaatgtattatcctttctatgtttaagtaacttaagatacacaaacgccactgcattacaactgccaacagtattaaacagagtaacatgctgtacaggtttgtagcctaggatcaatataccacatggcctagattatgtagtaggttatgccatcatacaatcgcctaatgttgtatttgtcagaacaaattcccatcattaagtaactacactgtataggcaatacatgactgtacttctaagtttagcattcattacagaattaaaacttattagcaagtctaaaaggacagttcaaatatcccatctgccttaaaataaaatcaccttaccaatcactgaatgacatcatgtaataaatggctggcctctgaaaatcattaaaagcagatggttcatggaaagaatctgctcccatgttatcaaagataagccaatctcccacattcagctcaggaagaagacagctttccacaatttgatcaagctcatcacaggatggaccccaaaggctgcttgtaaacagaggctcatcttccttgtatttctgtaggaaaagttttacaatttaatttttactcatacttacgcaggtattgaatttgtgagtaaataagtattttcactgtctcagatccaatgtgctcatggaaaaaaggcctagagccaagggcagggtgctacttaagcctcaatggtaccattaactccacgtaaaggcaacaaactaaaaaagggactccaccagaagaacgcaaatcctcaaaaaggacatttttccccattctaagatgtttttcaaaaaactgggaagcatcttaaaaataacagctcagcttataaaatgccaaataggttttgatatttctgataaaacttgccttgtgaacctctggaatggtatttaagtcctcagacagtttacttgcaaaagaaccataaacaccatcattcatataatacatgaaggctggttcatcacttccggttttttctactggaataaaacaggaaaggggaaaatgaatttttaataaaatggctcatatgaaacaaattaatgtaattttcacatttctcaaactatttaaacttaaaaagacacatagagcacgcatttcacaaaggaagataaccaatgagcacaagaaaagagtgctctagggctggatgcggtggctcatacctgtaatcctagcactttgtgaggctgaggtgggaggatcacttgaggtcaggagttcaagatcagcctgaacaacatggcaaaactccatctctactaaaaatacaaaaattagccaggtgtggtggtgcatgcctgtaatcacagctacttgggaggctgaggcactagaatcccttgaatccgggaggcggaggttacagtaagacagtgagacagtgagccaaggctgtgctactgcactccagcctgggtgacagaatgagaccctgtctcaaaaaaaaaaaaaaaaaaagaaaaaagtattaagattctagaagactttctgatagttgctgtttcaaaaaaagaggaaatgaagcagcaaggaaaaacactttttagtttcttttcaaatcagcaaggggaaggcaatatatgcacaaggagttaaatatgtgtttgaatgtagaattaaaaataaaagttgagattgtgccactcattccagcctggataacagagcaaaaaccctgtctcaaaaacaaaaaaaaaaaagaaaagaaaaagaaaaagaaaaagaaaacagtgctctacatcgttagtcatcaggtaaatgcaaattaaaaccacaatggactaccattaccaccaacctactgactggatcaacttaaagactgacactacaaaacatcagagagcaggaggagcaaccagagctcacatgtatacactgccagtgggaatctgtgtgtgtgtgtagagacagggcctcactgttactcaggctacagtgcagtagcgtgatcacaggtcaccgcagcctcgagcttcagggatcaatagatcctctcacctcactttgaaacctttgaaaacgcccattctactcacagctactctactcttagcacaaccaatactaattttcaggtttttaaaatatcactctccacgaaaacaaaccaaggctccctggagaaacaactgattacgggactgaggctcatttaaaaggttaaaatgagcctggaacatcttgatataccaaaaaataacgaattgctctgagaataatggagacatgtcaagggaaaaataagagtaacagattatataaacctattgaataaagatctatgagtctaaactcataaacaggagggaaggaaaagatattctttaagtaaaggccaactaatataaacaataatgaagttagaaattcaacaatagatgctaaaactaatggggtgaaaatctggttaaaaacaggtagtttacagagtctctaatttaaacttgccacttcacaatggaaagaaacctgcctgacacaaccttaaacaagtgctcaaaactagcatttaaattaaaaaaaaaaaaaaaaatctagccgggtgtggtggcacgcacctgtaatcccagctacttgggaggctgaggcaggagaattgcttgaacctgggaggtggaggttgcagtgagctgagatcatgccactgcattccagcttgggcaacaagagcaaaacagtctcaaaaaaaaaaaaaaaaaaaaatcataaggccaggtgtattgactcaagtttgtaatcccagcactttgggaggctgaggcaggtggatcacttgagctcaggagtttgagaccagcctgagaaacacgacgaaaccctctacaaaataaaaatagaaaaaaacctagccaggcatggtggcatatgcctgtagtcccagctatgcaagaggttgaaggtaggaggactgcttaagccgggaggtggagactgcaatgagccctgatggagccactgtactccagcctgggcgacaaaacaacaagaaaaaacacctagcatcatcaatattagaattggccactatcatgtgcctcctaacatgatgaagtgagaagaacagagtaacactttagtggacttcatgccccaaatgcatagcctaaaaaattaatcatgaggaatcatccaacaaacccaaactaaggatcagctatgaaatttctactcttcaaaaatgtcaaagttaaaaaatacaaagtaatgagctgagaaactttatctagattcaaggagaaatgacgaattcaatgtggtcctggactggattctaagcaaggaaaaacaaagctgtaaaaaaaagacaatattggggaaatggacaactttcctatgggctgtggattagtccacagccaaaaaaaaaagtcttcttaatgtaaaacagtatttcctacaatattagccaacaagatggtactgtctagtgcctttttgttggtttgacttgagttagattacagggactctttgtggcccttatgtgagaaagtgtgaaaacagagcctccctctgacccatgtgaggtaaggagaacagaaaagatcacaataaaagtagttctgaataatggatgagaattaatcatctgctagacatttatctaaaacacacgtatctaaacatcagtaccaagaaagttggatttggaagtcttacggaatgggaccttggctttaagattttttttttttttgagacggagtctcactcttgtcacccaggctggagtccagtggcacaatcttggctcactgcaacctctgcctcccggattcaagcgatttttgtgcctcagtctcccgagtagccgggattacaggtgtgcgccaccatgaccagctaagttttatatttttagtagagatggggtttccaccatattggccaggctggtctcgaactcctgaccttgtgatccacctggctctgcctcccaaagtgctgggattataggcgtgagccaccacgcccggccagttttaagatttttaaaagctgaaaaccacctacaacttcatgaccatctgctcatttccagactaactgcaattatctaccaacaaaaataaaactataaactttataacttacctccagagggaaatttatcattttcaacaactttctttgctatgatattaactgcgagtgtaaatgcagaagacacatagtagcttccgggttctgaaattatcttaacaccagatccttcaggaaagtagatatccaacagagggctgataacatgattaacctatggattttaaatgccacagtatggtttcaatattggattagataattcgcaatattcagagattgatattaacaaaattttctaggaaaatgaagcagttccaatcacagatcatgaaccttagcaactttgtagttatctccaagcaattaattaggcatgctttcaagtcagtttattttgtaactatcagaatggcattaattttaaaaatagctctaataacaaatacccactggtatttgtttttgtttttttttaagtcatttttctatacttgatcactaaaaacagaagtaaaattttcaaatcatagtttctagatatcacagaaggaaggagggcagagcaggaaggtgagaaacaggtgtgacgtgtatctggcctaaatgctaaagttggctgggagtggtggctcacacctgtaaccccaaaactttgggaggctggggcaggaggatcacttggggacaggaggatcatttgaggccaggagttccgagaccagcctgggcaatatagaaagactcaattttttttttttttttttttaagtcccagctacttgggaggttgaagcaggaggatcgcttgagcccaggagttggaagctatagtgagctataattgcgccactccactccagcctgggcaacacaggaagactttaaaaaaaaaaaaaaaaaggtagtagtgaagttttctaagtattaaatcatttgtgccattaagtacagaaacacaactgaaatagaaaatgttttatgataatgttcaaagaattctatcaaacttttcaaagttagctaggtctactaactgcctattccttttctaagaacataattttaaagagatgttatagggtttagtttctgccattgtaaaaatcctgctctacacatccaccacttaagtaacaaagaaagcaattattctgttaatgtcatctactgagaagtttacctcttccaattgaaattcagttcccgtgaatcctccaccaatgtctaacatgttcatcgtaaagccaatttctccctagagatggaaaaaaaaaatttaaatgtttttccaaattgtaatggatatgagaacattttaaaaaccccctcctagggaggtaaatatctgttctgatctttagtacagcaaattcttggttttttactgatagaaacagattattcaatgttaggtatgctgtctctttgattttatttgtactctcttctagacttatgcaagtaaattactatttcactcctttacctgcttaaaaggtgtgactgtacagagctctgaatgcttatataataaaaatgaggtgtgtgtcacgttgaatgtagtcagagtaattcacacaggcagaacaatacttagtctttaacttaacatcctggctaaaataaaatatcaaaataacttaaaagaaagaacttacagccatgtcaaacacacatcgagcatcagatagagcatgtacatatacttgagattctttgcaagcactcgaaacatgaaatctgaaacacatagaatactaaatttaaaggagcagaaagttgtagagacacctcctgtaatttctttcaactgtcactcatcatattcataccattaagtatccccattaactttaccaaatatttaaagtattagaagcattagcttctaattacccaaaagttacagtaccagctttatagaaaaggcaatgccaagataaaactgtaattctataaacaaaaattcttaacaataagtcaattatcagtactgttccacggttatacaataaggtgtgcttttatgtatatgtggcacttttatgtttatatagtgaagtaacaagcactaccaaatcgtatcacattcagttgagcataaaactgaacattcaattttacccaaccaaatacaaaaatgtgtctgttgtgaaataaatacaaatgaacattaatcaagctgagtaacagcattactattattcactagtattactagtgataaagtttcagaatagaatacttcctgattgtggcagtggtcacacaagtactaaaatccatagaactgtacccgtaaagtccattcttcttttcccttcatctattcgagatagtacttcattaatttttatgtcgacttaaattaaaacttaaaactagactgacatggaatgttatctattgtgtaaggcacagcatgatcccattctttgtttaaaagactaccacctatttatgtacaaagtagtatagaaagatacacaataaggccaggcacagaggctcacatctgtaatcccaccactttgggaggccaaggcaggaagattgcttgagccaggagtttgaggctgcagtgagccgtgatcgtgccactgcactccagcatgggagacagaatgagatactatctcaaaaaataaataataaaattaaagaaagatacacaatacatctttgtgagtgtttgaaaaagcaagacctttttactttagtaaaagtagcaatgggctggcaaataacatctagggcttagtgttactatgcctgtaattagttctgaggctattatcaagtatttgaacctcttggagtctcggtttcctcacatataaaattaaaaggctaaagcaaagtctaatttattgaagtcccccagagtaatcgttaaaaggacaaaaaagtctgacacttttattttcattaagaattctagcaaatcccctcccatccaatttaaaaggcggcgatttaagttactctgcactaactgaatcaaaatattatttgctattctttttactgtggggaaggaggtacagtcacaaaacagtatgaaaagggacaaggcatatttaagttgttttgcctaaactaagaagaaaacacatacatgtgtgttaaaagactagaaaaaattgcatcttagatttcatgcaaataaagtcttaaatcaataaccagaaagacaggttaccaccataaaatgttcacagctttaaaagtttaaaacaaatactcacttaaccccaattatttggacatcaagttccttagcacattccaagagatgcctacagttcttcagggtagtgccaaacttcatgttaccctcttcacctccaatattatcttctgttgcaatatgtagtaagaccctaagagaaggggagatgattggggcagagttggtttacatcatcatcagcacatgtgaagcctgaagattgtaggaagtgtgttgattatgttgccagtgctcccaaatccagcgacggatgaatcaagtgaacctaatgaaaaacaatcctgtatagagaaaaaactagcaattagggcctaaagcatgaagcttacaaggatgggattttggaaaatgcagcaagttaagactctgttgtagcatcaagagttggttgggctctgtaatgaaagacgacattactttcaaatgaagtccatcagtccataaatccacctaggaagactaaattgaatagcaatgccatcattgtctttcaataaaaatatcagggctttaaatgtcttcaaatttctttgattgtgctaactagctaaacctccatggttactgcaaacattcttcctactaacattgttacatcccagcaggtctctaactggaaaaaaataggaagcattttttaaatttttttttcttttttttctgagatggagtttcactctgtcgcccaggctggagtgcagtggcgcaatttcagctcactgcaacctccgcctcatgagagtgcctcctgagttcaagcaattctcctgcctcagcctcccaaagtagctggaaatacaagggtgcaccaccacgcccagctaattttttttatttttagtggagacagggtttcaccatgttggccaggctggtctcaaactcctgacttcaagtgatccacccgcctcggcctccccaagtgctgggattacaggcatgagctactgcgcccaacccagaaagctttttaaaaaattatttcatgtgtttaaacagcagccttctagtctactgattcaaatctatttggtatttccttccaaaccatggcaaccaagacaagatgactaaaactgattaaatttctttaatttcaggagctgagtaattacaaactgctagaagttgaaaatatacaaattctttttgtgtaactgttttcctatggatgtaataattacataaactaagaaggttaataatatggccatgaaaatacagctatggccctaatttgataatcagaggacaagattgatgaaagcaaaaattattctaaggttagaatcagctccatcaagaagatgccagtccacaatctaacatactaaacatcacaaatcacagcttgtcttcagaggatcacagaacaatattttttagaaaaacaagtggttccctagaattttcccaacaaggcttttatccacacaaagatttaccagagtaatcaatgctgtcaggatatcttaagtacaccattaaagtcagtatgaaaattatagacatacaaagaaaatacagatagaattcatttccggaaacacacataactcattaaaaagtaagccaacaactgcataattcaatatgcttttagcatattcttaagccctctcgatataccagtttgtgaaaacataaaatttgccttaaatctttttgcttttaaaaaagtaaacctttttatgagggagtcttgctctgttgcccaggctggagtgcagtggctcgatcttggctcactgcagcctccggctcctgggttcaagggattctcttgcctcagcttcccaagtagctgggattacaggcgcaggccaccttgaccttaaatgatccaccagcctcagtctcctaaagtgctgggattacaggtgtgagccactgcgcccagcctttaaaaagtaaactttctaatcaagaaaaaaaaaaaattctctggatacatgaagatgcaagtaaaaaattaaacttcatgttcaaaaataaaagtattagccttaaaaacaaaaccccccaaatctatggtctaggcttcgaagacactgtcagtaaagatgaccattcaagaactatggcctagggtagattaaatcctcagctaaacaggaaaaaatgctgaccaaagtttatcctgttcctaacgttatcaaacatcaaacaaagttatagaaataatgaaaatacagccatggccctaatttgattatcacaccaactatcaaggattccttgaagattattagatcatatccccaaactgctcttatttttttaaattccaattccacatgaaggatcagaggtagagagccaataaaatgttactagtgtttcccacagaggccctttaaataagttataattatgatacacatcattgccctaccacaaatgctcctttcttcccagacaaaagacaaacccaaccctctaagtgctaaataatattttcaagtacttaattttatacttacttggcatttgggtgattacgtgcaattttcttcaattcaatttcattgtcacatgtcaggatattcactccaacttttgctgcatactttatctgagacacttgcttgcaaggacttatgtaaataatgttttctggaggtacacccaactcttgcactaaagccatttcattctgtgaaaatgaggttaaagtgagaatacataatgtcacagttcatattctggtaatgcttcctctaatactattacccccaccccttttaaaaccagggtctcactctttgtattccaggctgaagtgcaatagcacaatcatagctcaatgcagcctccatctctggggctgctcaagtgatcctcctgcctcagcctcccaaagtgctacgagtacaggtatgagtcactgtgcctagccaaaccaatatttttatttaaaaacataaataaataaaaagtgagacgaggtctcactatgttgcccaggctgatcctaaactcctggctcaagcaactctcacctcagcctctcaaagtggtgggattacaggtgttagccatcgctcctggcctaaacattactaaaaagaagcaccaaagaaatctcagagtttagatatctgctgtagtttggtctagaagtagctctagcctaagaatgaggaacaaattaaagttttcaattaataaagataaaacgtttcaaaggctcattacactgaaacttccctttcattggtgcacttgaaaagcttgtaattttccaacatgaggctggagatttaaacaattattttgaaactccatccaaaagtcaaacttccttgcatttgttctctaaccgctgtaactacattaagttaaattattcaatgtttcagtttagttaaaaaatgaaaaatacttactttactggaacaagcaaatccggttccaagagctgccaaaatctcaagtacagctggagcagagttgcacttcactgtgtagaatggctttatctgagccactacattctgccattgactgtgtttcttcacaatctttccaagatctcccacaaaaaatgcatttttccctgtctattatggttataaaaaaaagacaaatatgaacaaaaaaccattgaaaatcaagtatcaaaacaggaaagaacacctcttttcctccacaaatatatgggtcaagacatatatttacatacagtaatacatttaaagcttgttaactagatttagtaaacattaaaagagactctgaatacatttgttctttcttcttatatttgattacttttgctgtgctacactagcatataaaatattctcccctttgagataaaaaaactattatcaattacagtgacaaaagtcagaatgaaactgccttgattttactttttggcagttgaaggaagggaacctattttctcccatgcttcccccactgtttaaaatactttggcagttcaggatataatttcctaatacagtaagtagaatcagaaatgctaaataaaacaagctatatatcgccattaaaactgcaccttaagacaacatggtaaaataagagaccatcttcactgggaaacctcttattttattactttttcaagagttgaggtcttgctctgtagcaacagactggagggcagtggtgcaatcatagcttactacagcctccaactcctggagctcaagctatcctcccatgttaggcctcccaaagtgctgggattacaggtgtgagccaccgtgaccaaccaggaaaccatttttaaaaagacaaggttgttagtctgcacatggagatgtcaaaattagattttaaaagtacataagtctaccaaatatcagataagcctgaataagaataatcttccttaaagttgtggctattctaggactagagagatgacttatgcagttggacagaacatatattactcagtgttagatagcaggcaaaaaaatcttatttaggacgtacaacatccaaatactgtttgagaatccatgaagacaatgttactgttttcaactctttaattcacagtatttgaaaatgtcattagaatatagtgcccaactgatataaatgcaaaacgcacattatgtgcagcagaattttaacagttgtattaagttatccatcctcccaagatatgatatctatggtattccggagacacaaagtttatatttaatttgggaaaaaataaggtatttacgggaaccaccaagagaaatgggatgaaacaacaaggtattcagcttcctttcttaggcatgatgtgagtctggaaaattctcagtaggcaacgaaaaacaaatttagggagcagggaagccttgtatttaatgaatattcaacaaaattaagcaggcttgggcaaacaataggacgatgaaaagggaaataagttaggaggtcactataatgacatgtgcaaagacggatagatagtgggaatggaggagatgaataccaggatgttatgaaggcaagaccaaggttaaataagagaggacaaacaaaaggtggactgaatgacttagagaacacagaagtgtcaccccagagccagaaaagaatggggttgaggagtaatcctcattgaatgctactaaacgtgggttaatttagatgtgggatggaaggaatatttcaaagattatatctgacccccgaaaagtgttgcaaaaagtcagaagaataaagttaagtgataaaaatgatcatcagaatttgactaggagcttcccagtggcaactgaagaatggcttggcagaaattggttgaccaatatgacaagtttcatgaccaatatgtcaagttttaacaagttgaatggcagaggaagacaaagggatttttgctaggatgaggggaagatgaacacgtctgcagacttaaggtcaagagaaggagaaaattttggatattcaattactgaacaccggtaacatgaaaacaattatctaacaagtttggttgaatacaggaaatttcctccaataaagaaagattgtatcagttaagtctaatatatatatatataaaaaaaaaaaaaaaaaagaccaggctgggcgcggtggctcgcgcctgtaatcccagcactttgggaggccaaggtgggtggatcacctgaggtcaggagtttgagaccagactggtcaacacggtgaaaccctgtctctactaaaaatacaaaaatcagctgggcctggtgctgggcgcctgtaatcccagctacttgggaggctaaggcaggagaatcgcttgaaccagggaggccgaggttgtagtgagttgagatcgcaccactgcgctccagcctgggcaacaagagtgaaacttcgtctcaaagagaaaaaaaaaaagaaaatcaccttaagtagcagtgagtatatgattctgtagaagttgactcctagagcagcagagagtaagtactcaggataaattatcaaattctcaatgaacatacacaaccaaaattatctgaaagtaaattaatatccactgaagaatacaactgagaccaggcacagtggctcacgcctgttaatccaacactctgggaggctgaggcgggcagatcacatgttggtcaggcgttcaataccagcctggccaacatggcaaaaccccatctactaaaaatacaaaaacttaggccaggcgcagtggctcacgcctgtaatcccagccctttgggaggccaaggtgggcggatcacctcaggtcaggagttcgagaccagcctggccaacatggtgaaaccccacctctactaaaaatacaaaaaattagctgggcatggtggcgggcgcctgtaatcccagctacttgggaggctgaggcaggagaatcgcttgaacctgggaggcggaggttacagtgagccgagatactgccattgccctccagcctgggatacagagggagactccatctcaaaaaaaaaacaaaaaacaaaaaacaaaaaaaaaaccacttagctgggcatggtggcacagacctgtaatcccaggtactcgggaggctgaggcataaggatcctaaatcaattgcttgaacgcaggaggcagaggtcacagtgagctgagatcgtgccactgaactccaacctgggcaacagtgtaagaatccatctcaaacaagcaagcaaaaaaaaagaattgaggctgggcgcggtggctcgtgcctgtaatcccagcacttcaggaggctgaggtgggtagatcacctgaggtcaggagttcaagaccagcatggcgaaacctcgtctctactaaaatacaaaaattagccgggtgtggtggtgtgcgcctgtaattctagctaattcaggaggctgagagagaactgcttgagcccaggaggcgagggttgcacgtgagccaagatcacgccactgcactccagcctgggcgacagcgtgagactcgtctccaaaaaaaaaaaaaaaaagaaaattgagaaaaatgagtaagaagccatgtactgattagaaggttggctggcatcacatcaacagaataaacagaacatatgtgggtgccagatgctaaaaggcatagaaggtaaagggccatagggaggattttaaaataatgtggattggaaagaaaaatggatcactactcaaggggagtgggtgtgggggaggaaggtcaagttaaatcagatagcatatgaaccaagtacttctgatcagattaccatcttggaaattaaaaagcactcgtttcagagcttggaaaatgacaaacactgtatttgagaaatggcacttaccagggtatgttcataaacatagttatcaataacatttccaaggtttgttccttcatccaacaggccaacggagtagtttgcatcatcaataaatcctttcatctcagccgtattccacaaagccgaaagtcataaaccaggaaagacaagagacgggccaccaagcctatgtctgggtccttagaatatgcaacaaactgtcaaaatataagttatataaaagtctgtattatttcaatagacataatgtacgagtcaatgaaagtgtgctaagtgcctaatttagtgaggaatttacgcaattttacaatttcagaaacatcagattattaatttcctttaacgcccatttaaaaaagcaaatacatgaattaaaatacatttacccaaaaaggtcaatataatttgaaggggtaactcacatatatacacaatgtattacaagcctatatggtcaccttacttacagagttgcagacccaatctgtattattatcttgttttgcgttcctataacacacataattttacccattttaagagtaaagaaagctagtgaaataagtatctgcatccaagaaatcaaaataccagtctcaacttccaatatactgtcagccacgtattagcactgccaggtaattgcagataaatgtcttataaataaaagtcctggccgggcatggtggcccatgcctgtaatcccagcactttgagaggcccaggccggtagattgcatgagcctaggagtttgagaccggcctggacaacatagcaagactccgtctctcctaaaaaaaaaaaaaaattcccaaataggtgaaagtaataaaaatgggtgagagtggagggtggcttgagggaacaatctgaagctttgatacagactgcctaagccttacctcaagctaaaatagtactagctgtatcaagttagcaatgttatgaggtgagttgctttggtgaaatcactggactaggagtcagaagacctggtcctggctatatcatttaggagaatctacatcaatttctctaaacctcagttaactaccttaattatttcttcaacaggttgttgtaaaaaaaaaaaaaatcatagagcatataaattaaaaacatctgtttcagtgctggctagaatagagctaaaattgtcaattaccagaaatgcaaaaataacacaattagaaactacatttgtaaattaggtatctgtacatcctgagccagttactaagtaatctgatttttaaaaaggctttaggctaaatcctatccctctccactcaaatcaatgaaataaacctgcccactcccccggagcactcattgtcctaaggcagcacatactatactgacataaaggtttatcttctttgttgaacttcactggtccttaggttactttaggaaataacttcgacataaatgagataaaacaggtccaccagacaggatactactcaatatctggtactaatttctggttgccacattaataatggccattgaccagctgtctgggcagcctgttttaaaacctgcacatcctttcctgtgtccttgattcctcccaccacccccctccaccctccctaatgccccaaactagagttcacccttgggtgatggccactgtcctgaaagtatactccatttcgatggttcttaaaagtgtcagcattttggctgcaccaaaacagtccttaataagctgtattagtcaaatttcatgaaatacaaatactcagttttaacttttcaaacactaacagcttcatttccaagaagccaactacattcagttcaactcatcagatctttcatgccatatagcacagactgaaaagtttaggatgtttttattttaccaagttaattgaggcctatctaaatagacctaatacctgtgcagtgacgtcaaatcacagcctgcacattctctaaagactgttataacaggactgctgtaaatctgtgcccagaaaatatagacattttaggctaagaatacatgtttattttaagcaatttaaagcaccaattttggggggatattcaactgagcactaagaacaattaaaaaaataaaggtcactcatttaaaaagataaatataagaaaataaggtagaaacttcctgttaagtttaacatcactaacctttttggcatagcagccagttttcatttatcttactattaataaatgaaaaaatacgaaatcaagacttttggcctaaataaaatactttgaaatggaaaaaaaaataagtaaattgtgtcctcactttatgtcaatagcttcttgcaaactgtgtcttttaagtaagaggtaaaacgaaaccattttttttcttaacattataatgaaatgttatttgagggcttgctgtctatgtctttttgcttaaagtcgcagtttccaagaacctactgatgatgttcaatgaggacttaattgtatctcagttgctgttgctaagtctctgggcatagtctaatatatatgtagtatttagtatttagttgaaaacctttggttattgattataaacgacaacacacaactgctgccaaatacagaaggtctagcttttaagtcaggataagataaacctccatttcctacaaccatagtgttcttaggaagggtaattttcctttaacagtcaggatcctcagtacttataaaaacatcaggcccactggatcaagtcttactggctgactacctacattcttcagagcttctgctacagtagtatgatgatatggataaagatattttttcccaaatattttcaaaccatataatttcataggttcaactctgactgcctgctaagctagcttaaatctaacagtaaacatgtttatagcagtctcccagcctaagtgtttcatctattcaatattaattctcttaacccttaaaaccacaatgacggtattatctccattgatatactgaggaatagaataattaagtaggttagctctagagatactaatgatcaaactacatttaaaacaatatgaaaaccttgcttccccagcaccccatccctataaaacacaggactccttttttttttgggaaatccaacacagttctcagtctctttaaaagaactttatcatatccacataatcaactaacccctttcagacatatgaacactcatacttgttgaaaaatgctaagtttattcacactggtataaaaacattatcacgcctactcacagcctttcttcatatgatgtcccttttgcagcaaatccccaactccaccccaggcaaccactgaccagcttcttgtcactataaattaagacttttatagaagctaaataattttaatcaactgaaggctaaaccaaaacagctgacatatagtgtcattatcaatataaataaaaatagtgaaaaaatatgacctcttctaaaggaaagataaaatgtttgtggagttgactattcatctttgaaatggaactgttacttcagaagtaacagcagagttgttaaccacgtcccagctgagtgacaaaatcattctgttgcaaaaatgaaataaaattcatttgctatattggcagtacttgacaaaatggattaaggatcacctgaatccacagatgtagtacattaacatttgttttctttcattatacagagaactacaataaagtagttgattgaacccaatactttgggaagctgaggcaagattttgtgaggccagaagtttgagatcagcctgagcaatatagggagaacccatctcttaaaaaaaaaaaaaaaaaaacaataaagctctaatggaggtttattttctttgatgctctcttgaaggctttgagattgctgtaaattcctagcccagaataggtactcagaaacaaatggacaaaagacttcacaacaaacagtggggagttcttaaacttaggggtggtggtaatgaactccctggaagtgtattgaaaaagtagctcaatttttcccattttttttttttttgagaaaaggtctcactcttgtcacccagactggagtgcagtggcatcacagcccaccgaagcctcaaccactcaggcgatcctcccaccacagccttcagtcccacctccactcagtcagtccctgtagctgagactacaggcacatgccatcatgtccagctaattttttattttttgtagaaaactctttgttcatagtgtctcactatgttgccccaggctggtctcaagctcctggcctcaagcaatcctcccaccatggcctcccaaagtgttgcaattaccggcatgagccactctgtccagctctttcacattcttaaaagaagcccgtaactttgatatgcaagcaatccagatgtatagtcatgcgttgcataacaacatttttaataaggacagatcaaatatatgaaggtggtctcataataccatatttttactgtaccttttctatgtttagatacacagatacttaccactgtgttacaactgtcaacagtattcagtacagtaactcggtatacaggatggtagcctaggagcagtaagctacaccatacagcttgggtgtgtcgtaggctgtactatctaggtttctgtatgtacactatgatgttcaaacaaccacaatgtcacctaacgacacatttctcagaatctatctctgtcattaagctacccatgcctgtgaatgcaaagctcaactatcagctactgttaaagactaaaaggccaaaaaaaaaaaaaaaaaaaaaagccaattcctcaaaagaatctgtaaaacacaaacatctgcagcaacaagttttctttttttgtttttctctttatggagaatggggtctcactatattggccaggctagtctctaattcttgggctcaagctatcctcctgtctctgcctctcttaagtgctgatattaccagtgtgagccactatgcctggtcaaattttctaatatatcttgaggcaacaaactctttgttcaaatgaaatgccacttggaaacccagtatttccaactgaaaagggacaagtaggtgggtgaggtaggttgcttgagtctttcatatgttgtgccccaatctcactgaaagagtcctaaaaaagcagctcaaatcatacctctgggatcactgcttgcagttttcttaatatattagcaaaaatagtttacagttccattgttaaaaaaaagaaaggtttatgttgtgacatttatgccttactgaaagcactaagaaatattttgccaaaacgttttcaggaggtattaaagttaattggcgacaatatgtcaaaccaaaagtcttaagacacagcatgttctagggagcaagcatgaaaataagtgtgcatgtttcgggggtgagcagtttataccttactccagattcactaagttaatctacctcaatcttcaacaccacagggggctgggcacagtgtaatcccagcactctgggaggccgaggcaggcagatcacgaggttgagatcgagaccatcctggccaacatggtgaaacttgtctctactaaaaatataaaaattagctgggtgtggtggtgcacacctgtagtcccaggtactcaggaggatgaggcaggagaatcacttgaacccaggaggcggaggttacagtgagctgagattgtgccacagcactccagcctggtgacagagcaagactccatctcaaaacaaaaacaagaaacaaaaacccccgcacagggactctttccaggacgtctccataccctccactaagaatgcagactcaaaccaaggtgatatatcaagtatctccttgcaattctgagtggaaataattcccaaaagaaactgtaccacttcttctggcttacagatcagaaacaggactgatttactggctgcaacacattctggtgctattggaccttgaactaattatattaaacttgaaaaaaaaactactccatgtaaatcttagattctcttcattagaactgaacagcaaatctagctctgatgtctagtattatcaatagacactagaaagtattctctactcacaagcacttttaagctattttcaaccaccttattaacatacggttgagaaagctcaggttattttacactaatacagtagcgtataaccacaatactacttttattaataatttcctcttagactcataactgagaagaaaaaatatgtaacatcccttattcacaccttcatatgggtgtttttttaatacatttttccatgaagagctgccaaaagaaacaaaaggctccaaagaaccacacactgctccctggagcctttcatgaggccgctgagtcctcatgttcatcgacagggtagctccaagagtagtggctgcaggagctgggcacttgccttgttacacacctgctacaaaggcttctacagttgattgtacttcagaagaaactgatacatctctcaaataatcacaagataattctggcagcaacagcccacttgacaccaagctggatgaatatgagtcttggatttctgaagtgaagacctccctggaagtagaacagggagagctgaaaggttgagaatactgtttcagagacacctaagcaggaaacccaaccttaatacatcaaccatttttctaaaaggatttttactcattaaaaatgagaaaagatattctgaaatttacactattactgttactctgaagatgcctaggtgcatttctacttttatttttacataggcatttgatgacttagcacccagctcacagctttaaaaatatacaacgttgcttaagtcccctctgcattctacctacaacagaaaatgttacttaccacatagaatacctttaaaagtaattgaccagaagagcactagaagcttctaaagaatgacatctaccatagatgtgagaccttgagtaggtctgaaacactacaaaagaattccaggaagctatatactgaaactggtaggaaatcctataaatttagtgatcataagatcaggtaaacttctgccaccctggaccccaaaataagtgatagacaataacaacagcctacattgagtactcaggataaatcaggacaaggcttgcttcaataagaaagccagtaatcacaatgcatacccctaaacttatttttcaggtgatgaggttgaaaaaactgagtaaccttagaggaagaagactaaaggtgactgctaaagatttattttaaaagagaagaacaagaatgaataggaaatatataagggggcaaaaaatcccaaaagttataagcccaacaggctaagtttgaagtgcctgtgtaaagactgcccaatgaactgcctcaccataaatattaaaatgtagcttaatgagaaaacaaaatacacaattctcacagcaatattatttttgcacgtggaattaacacaattagactcccttaaaaatgtcttgactattcaatgtgaagactaaattttttttctggagaaaatgtgtgtgtactaaagtgtgtgtgtacctgcactcaagtgaaatatttatatcccttttggcaattaagatgtgataacattaaagataactattacaatacaacatgaagtacacaatcatattaatttcaagttttctagctttcctgattacaattaagcatagggaataatcctttaaagagacacactattttggttaccttaaggcagagctcattgcctgcctgtccactactcacccaaggaaaacatatagaatacatgtgcaatacagtaattgcaaccaagaccaagttaagcaggttattaagaaatcagatgctggccggacatggtggctcacgcctgtaatcccagcactttgggaggctgacgcaggtggatcatgagatcaggagttccagaccagcctggccaagatggtgaaaccctgtctctactaaaaatacaaaaattagctgggcgtggtggtgggcacctgtaatcccagctacttgggaggctgaggcaggagaatcgcttgaacctgggaggtggaggttgcagtgggccaagatcacgccactgccctgggtgacagagcaagactgtctcagaaaacaaaaaaaaagaaagaaataagatgtaatatctcagaggcccctgtacctctcccttagaatttgtttagaccttctctaatcatcattcctttgttacttaatggttttattcttctatgtgaccctaaaacagtgttgggcaatgtggtactttacattctagtactagagtccttattccactgactggcagtttaagtagcactgatctagggactacagtctatacctgggactggaactgctagattgttagtggcaaacagttttcaagtcttttgctcagtttcttgtttttgccttttatttatctgaaggagctcttcatgaatttaggatagcaaacctctcattaggagtattatttttggggtgattgttttgtcagaatttccatgttgaacataccaggataaccccatcctacctttggtcatgccaaatataacatgttcatgctgaacctacatgagctaagaagataccatacttgtttaggagatctttgcaaactgggcatcagaggatccttgcagtaaaaagcaagaagcagataaaaagtaatctgaagtcaacataaagctcatactgccaagcatggtggctcacgcctgtaatcccagcactttgggaggctgaggagggcagatcacctgaggtcaggagttcgagaccagcctgaccaacatggcgaaaccttgtctctactaaaaatacaaaattagctgggcatggtggtgtgtgcctgtaattccagctacttgggaggctgaggcaggagaattgcttgaactaaggaggcagaagttgcagtgagactgaaccactgcactccagcctgggcaacaaaggtgaaactccatctcaaaaaaataatagtaaaaaaaaaattttttaatacaaaaattagcagggcgtggtggcatgcacaacgtggctggacctcatgatggctggctatggcctgggcaggttgaacctgactatcctaatccccgtaacccagtatgctacacagtattttctactcatgcataatgtaaaaaacagtggattaacgaaaaggagagctaaatatctgctttagttaacttgtgacaaattgcttgatttgactgggcatggatgtccctggaatggaggaaggacaaaatatctgtgctccctggggcctcaccagtatgtaagcacttcaacttggaagagtctccttaggcttatctgaacaatggccagtttagaacagtagcctgccatatactagattttaaggtttacaagcctttttcatagatgcaatatctcatttattctaatggaagttaaatatcgcaaaagggattggtttacctggggtggggtatggggagacccaaactggaaaactctgaaacaagatcaggttgggtgaagactgtgatggaacacacagattggtagtcagtattaattttctcagctaaactaacctctgtaataaatgcaaaagccatttatcccgtttaaaaactggtctatggtcgggcgcagtggcgcatgcctgtaatcctagaactttgggaggccaaggaaggcggatcatggggtcaggagttcgagacaagtctgaccaatatggtgaaaccctgtctctactagaaatacaaaattagtcgggcatggtggtgcatgcctataataccagccactcaggacgctgaggcaggagaattgatggaacccgggaggtggagtttgcagtgagctgaaatcgcgccactgcactctagcctgggcaacaagagcgaaacttcgtctcaaaaaagaaagaaaaaactggtctacgttgctttccaatctttttgaccttcctaaaaaaaatgctaaatttgctcaaagcaagaaataccatgtctctaaaaccttgtttatccattaatatgctagtattcacattgtgcttttacagaatatttttctgctactttacacaagcactgacacaccattgactctactttatgtatgccaaggggatatacagactgtgtatttcaacgatagtggttttactcatctttttggtcaaagagtatcaaccgccattaatgaatgttctgttacatttgctcatatcacagtatccttaaagtaccaaatatcatctgtgagaaattaaatcggggggtggggggagaaaagaaaaaaaagtaccaaatatcaaaactgaaattttcccctttctctgcagtcagggtcaacaacctccctttcccttgagacagtcttgcactgtctcctagtctacagtgcggtggcaccatcttggctcactgcaacctccgcctcccgggttcaagcaggcctcagcctccctagtagctgggattacatgcgtgcaccaccatgcccaactaatttatttttgtatttttagtagagacaaggtttcaccatattggccaggctggtctcaaactcctgacttcagatgatctgccggcctcagcctcccaaagtgctgggattataggtgtgaggcaccgcacccagcggacaacctccctttcctactgataacttacagtgaaacatgaggaaggagtactagcaaattcgtaaagaacatctttccagccaggcgcggtggctcacgcctataatcccagcattttgggaggcaaggggggcggatcacctgaggtctggagttcaagaccagcctggccacatggtgaaacccatctccacaaaaatacaaaatttagccgggcataatggtgggtgcctgtaatcccaactacttgggaggctgaggcggaagaatcagttgaaccagggaggcggaggttgcagtgagccaagattgtgccactgcactccagcctgggcgaaaggaggagactctgtcaaaaaaaaaaaaaaatatatatatatatatatattttttttccctagttaaaataatcctaattaggtagggagctcctactaaggcatgtgtaaatactaaagattaggagacaaaatgtgaatatttaaaatgctgatgttcttctgaagttcctacatgaatatatagagccgactaatgacaaccaggtaaaaaaaaaaactttttaaagcaaacttgttaagagcccatttaagcaaatcaattaactgaatcccttttccatactgcacaacattaaagggtatgtgataatgaatctgaccacatcactggatccactatgagaagcaaacttagctttttaagttttaaaatattttccattaggctaattcattaattataattaaacctacaaccaaaataaatagaaaactagcccactggaaaacctttactccagcatcaagacctaggggatttctttttttttgagacggagatttgctgttgtagcctaggctgaagtgcaatggcacgatctcggctcactgcagcctccgcctcccagattcaagtgattctcctgcctcagcctcccacgagtagttggcattacaggcacctgccacgacgctcgactaattttatatttttttttagtagagacagggtttcaccatgttggccaagctggtcttgaactcctgacctcatgtaatccgcccgccttggcctcccaaagtgctgggattacaggtgtgagccacctcacctggcctaggggatttctcaaaaggctcacaaaaactttttcacaattaggggcccattaatctttgatattgaccttaaaatattttgttaagacatttttacagtgtttgcgtactacatcatacacacattctaaattatgaaagaaaaggattatgtaagcaacttccaaaatttccagatacttagtttattccatcaaaattcaggtggttgatttaaaacctaactctgaagccaattctggatctcagactacctgcacgggaatcctagtggaccagttcaagcagagttcatatagctacatgctttgcaatgctatgggccaaataatttccatgaagctgttttaactccttttaatggttttcaaataatattgttgatctacagaaaattaaccccaggatttcagtgtccaatagagcaaactcttattgatttgtaaggataacacatttctggaatgcggaattttctcttgccaattttacaaattctagtcaagaaacctttgggactaggtatctttgtgaattcagaattctccagattttgaaccataatgtagtacacatactttacatatgttatgtaatattcttcaggagaatgagtcagcaccctgcaaccacaatatttctgaagcaaaatttaggaatattaacactaaatgggataagtaaagacaaaaatagcctcaaatcagcacagatccaggtcaagttttttttgtttttttttttttttcccaaatcagttaaggtcacatcaaggaagctataaaaaaatttttttaaagactttttggatttcagaattctatgaaaaagggattgtggacctgtagctttatagcaaagcatcaaatactagacatgcaaaatgagaagattacatgtgaatatttaaagaagttatatttgtttgacataatatgcattgtacccgggcataataaagttaaaagccagttattctgactgccagaacctgcagaataaattatctttagcttctatctgctcccattccctcctacccacaaagagggagacactatagactttctgaatcctacattattaatctaaagactacttttccctgattttgcagaatcattcagctcactgacaatagtctctcaagtttctaagaggaaacaccagtagaaatattaactataatgcaaggtaacttttctttaaagcaagagacacgaattaaaagaaggattatcttttattacggtcttcctcaaaagacgaagcttgttcttaaatttctgccttagaatggattcacaactatgatgttaactttaacagattgcaccacccaaaaaggttttatatctccaagtcaacttgggagaaaaacatcaggtatgttgcaaatagaacagatggactaacaaaaattaggcaactgacttagtattgaaacagcaatgaccctgcttctctttaatgtgcacacaagccacctggatatagactctgattcaggtttgggtgaggctgagattctgtatttctgttctaggtgaggatgctaatgcaattcgtccgaagactacactgcataaccaaggacagtaatacactcaaaaaaagaaattatgccagtttaacacaaaaagaactgttccagtccaacattatgttatagctgggattcacatttgctcaaatttacacaggtaggagaaagccagtataggaaaccctctagccaacattctaagtcaaaggtttcaagaaatcttactatttaaactgtgtttccttctctttagccttaaaaacctgagtctaaaattctaatttgtattaacatcaaatgtttgcttagagcaaacacttttatcgaatagggatctgtttaacaagatcagattaaagaaacactaaaactgataccctcagctttcctgaaaacttacctctaagtctctgaccaaacttaaaaacacttaaattttaataacaaaatctgaatttccgtaacaataagtctatataccacaaaatttttaaatgaacccacacaaatctagtagcccaaattcagtttactgtggaattacattttgcacaggggctcaattctaaagtaaaattcacacatagaaaaccaagtatagtcaaaaactatccttgaaaatctgttaaatatctatattttaataccatacatatattttaataccatatacatatttagatacatatataaattgagatatatatatgtatctctatctatctctatcatctttcagcaagtcctctaaaaacaatcagttagttgttcctaccagctgagtagcaaaaatcatttcactaagttaaatggttgaatgatgtgataaactataccttatttcccaaaagccctcttcaacgtatattttctaagttatgcatacaagatagttttaaatgatccagtcattggtaaacaatgcacacaactaaatcagtcaagtctgtaaccagtaactgtcttatctctatttcagaaatttaaaagtcactgcactttaagaggtaaatgcaatttcaaattctgaaaaatactaagcaaggcagcactcttccttcgattttaaagacctcctccccaccaacaaatgtgcaaatacttacatggacaagttgggagatggaacccccctatcatcagctaggttcccaaggtggctcagcgttgaagtcgaactgctctctatacagcacttctcctaggccctctgggtagttgtatacttggtcagaaagttcgccctaaaagaaggaaataaaagtagcagaagatagtcctatgttaaaaaaatgtttaggctgacttaaacatgaactgtagaatacgtgttcattttataacaatgtttcattaaagtcacattacacaagtgatattttcaaagggtttaccacagtaccaagtactttatgcagtaaacatttccaagctgctataaaaaattcacagaacttgatgtcatagccatcttaccaagtcgttttatctgcctactcaagagttaccagccttcatttttgaagatgaaaacttcatttttgcttttatttgtcctctaaaattccacatttttaagtggtccagaatttaaaaaattccaagtaccctcaccaacctagtgtatatacaagactttatatgaataatgtactagcatgacccaatagtttggaaccacccagaacactcttttactcctcaaatatttgtcttttacattttaaatgtaaaaatccaccacaataccaaaagattttatgacttagctaatgcattatatatgtatctaacataacttttgaaaaacataaaataacttgagaacttccttataatattaagcaactaatctcttaagatttatcttctcatatctaacctatttggacataattcattctattatcaccaggaacaaataaatgtgataagtgcacagcacactatacaacatggtaggtgagttttagacattgttaccactcatcacttctaagctaaaatgatatacctatgtttctatgtataattcagtggttactgttttcaagtaaaataatctgacagtgtttgctagaaaggggtggtaagaaggaagccagaaaaccagaaattataaagtcaagagttggagggatttcagaagcactgtaggcatacctaaagtgtatctcaccaggatcaaggcactcctggtggaggcaaaatgtttcatctatctaggagaagctgatcacatgctcaatgaatgacatttatggatgatgaggaaagaactcctacaaacatgcaatgatgataataatcttacattagattccaaataatgtactactccataacattctgattctttcaacaccaacgtaattttctaaataaataaaaagttgagtcatgctggggacagatcattctcaattatcctaaggaataggatcagataccctaggtaagacattattcatctttttctcaatacatatatccacagctattttgctgcttaatgcaacccaagagcaatgatgtgaaacattatggacattaaacgtcagacattccagaatgttcctcagtgagaaccctacaacatttccatttaacaaaaagatactagtagggaatgaaggctctagaatttgaaaggcattatttaaatacaaaaaatagggctaggcgcagtggctctgagccagtggatcacttgaggccaggagttcaagatcagtctggtcaacacagtgaaatcccatcttctactaaaaatacaaaaatcagctgggcatggcggtgcacacctgtaatcccagctactcaggagcctgaggcacaagaattgcttgaactcaagaggcggaggttgcagtgagccgagattgtgccactgtactccagcccaggcaacagagggagaacctgtctccaaaaaaagaaaagaaaagaaaaaatgagccagatgtgacagtatgcacctatagtctcaactactgaggaggttaaggcaggaggactgcttgagcccaggaatttgagtccagcctgggcaacacagcaagacccaaaaggtgcataggataagcacttcttataaacacatacaggatagataagcacttcttataagcacttacatacaggatagatagaatgtttatccggacagttaggataaaaaagcatgaagaaggacttgttaaatggaaatgcggagaaaaggcagtatggaaaaaaataaattattttcacttagaatggtgtatgtaaacactgcaaattctctaacaccttagagaatagcacagagagggctcggttggtcagtaagaaacaagaagcattttatgtaatttattttattttatttttttgagacggagtctcgctctgtcacccaggctggagtgcagtggcgcgatcttggctcactgcaacctctgcctctcagattcaagcaattctcctgcctcagccttccgagtagctcggattacaggcatgtgccaccatgcccggctaatttttttgtatttttagtagagatggggtttcatcatattggccaggctggtctcgaactcctgaccttgcgatccacccacctcgacctcccaaagtgctgggattacaggcatgagccaccacgcctggcctattttattttcttaaaaataaaataggaattcaagctggccttgaattcctgagctcaagtgatccgcctgcatcagccttccgaagtgctgggattacaggtgcaaaccaccgtgcccaactacaaaaactttctatcactttgacagtaactattacaaacttagtatctcaaaattatcagtacgtctctgaaaacacaatgcctttaccaatgatttttaaaatcgttctgtggtattctttgtaaaaactccaaaccccagtctaatcatgagaaaaacatcaggtaaaccccaagtttaggggaggggagtattctaccagatatctggcagcacttttctagactgtgatggtaatgaaaaacaaaggaagactgagaaactgtcacaaaccaaagaaaactgggaagacatgacaactaaatacaatgtggtaacttggattctggaacagaaaaagacattaaagaaaaattggcgaaatccaaataaaagtctcgaacgtttcatagtgccaaagtcagtttcttagttttaacaaatgtactgtaataacgtaagatgttactaataactgggtgggaagtatgaagaaactgtatctttgtgactttgctgcgcaactaagatactccaaaataaagtttatttttcattattattattattttttgagatgaagtcccgctgctcttgtcccccaggctggagtgccctggtgagatctcggctcactgcaacctctgcctccccagttcaagcgattctcctgactcagcctcccgaggagctgggattacaggagccagccaccacgcccggctaatttttgtatttttagtagagatggagtttcagcatgttagccaggctggtctcctgacctcaggcaatccacccgcctcagcctcccaaagtgctgggattacaggcttgagccaccgcgcccggcctaataaagtttatttttaaaaaaaacaaccaagggacagtcacctaatgggctactactcagcaacacaaataatctactgataatctacagataaagacaacagggatgaatattaaaaatgtgctgagttaaaagaagccttttataccaaagaatgcatactgtatgattccattcatgtggaaagtctggaatagacgaaaataatctatgggtttaaaaaaaaaaatcaagatcagccgggcgcagtggctcacgcttgtaatcccagcactctgggaggccgagatgggcggatcatgaggtcaggagttccagaccagcctgaccaacagtgaaaccccttttctactaaaaatacaaaaattagctgggcgtggtgggcgcctgtaatcccagctgctcgggaggctgaggaaggagaatcgcttgaacctgggaagcggaggttgcagtaagccgagattgtgccactgcactccagcctgggcgacagagctagactccaaaaaaaaaaaaccaagatcgtggttggctctgtggtgactggaagacgatttgaaaggacaagaaaaaacttttgagggtgatggcgatgttctacatcttgacaaaaggtttaggttacacagctgtatttttgtcaacgttcatcaaattgcatacttaagacttgtgggtttatactgatgtgaattttaccctctaagatttaaaaaatagtaagcggtactgagctctatttaatatgcacatactaaagttggaggggtctccaactttactttgaaatgcatcgacaaataaggtaaaatgttaattacagaatctaggtggaagtataactctttttcaccttctgtttgaaaacgtatgtgataaaaccttgggggagaaaggcactgactactcgacctcacttatcaccaccgataatcattttcttttggagtctttcctaaactccttggggcttatttctaatcatgatcagcatctgcacgctctcgtatatgtaaaagaaattaatgaattatgagggcctttctagacaatcatgagccatgtttctgccaacccttgctgtatttgatgtgctttgatgtacttctactttgtgctttgatgcacctctacatcaaccttcgctgagcacaaggcaattccccctcctttgagtccttagattcccacccagtctgggaattcacgatagaaacacgacgggacacagaactaatataaccaagatgccaccacaaaattcagttaaatgtgctgaaacatgaggcggtaaactgtgtccccgactgtttcgggtttctgaaccagcagctttgtctacgaaacacacattcaggataccgtgtaagggttagaacatgttaccaccaccaactgttggcagtcaagacagtagttgataagccacccgtctaccaatctccctctttctgcctaggaaccatggcgcggacggaaaaacgaagccatggtgactaatcctcaggctccaggaggtgactggggtgagtgaaggcgacttgacccaatcaggagcgccgcaggggcggagcagcagcctcgaggcttccagaaggggccaaaagcctctcgctggctacctgacaccggggcttccccgccgccaggccccaagtggcgtcaactttcctccaccagagggggaccgcgctccccgcgccccccaggaatccgacttcctccgcagctgtcaccagaggccggcgcggggcccgccccgctccattcataaccaggaccccagccgttgcagcccacagcgccgcccgcccgccgggcttcgggaggcaaaggtggcggcggcgcaccgcggagtaggggctgcgggaccccggcccctcagggctgcggccgggccccctccccggaaacagcaatgcaccacgggagaggggtgggggccgcacgccgccaggaggggacggcgacccccggcggcgagacccccgcgcgctcccccactggcacacgccccctcgccccaactgctgcggctccggctccgccaagcgtccagcagccgcccgaaggtcctgaggcgcggcccgccgcccagccccgccgccgccgccgccgccgggggcacagacagccgccgccgccatgttcgaggcggccggccgcggggcgctgcggggacgtcttaagggcggcggggcccagccggagccccccagccgccccccaaggccagccccgcgtcctggcccctcccgcgctcctcggctcggtactcacgtgagataacggcccaaagagtcgggtaaagcgtcttctctttttcggcggaatttttaaagagggatgtggttaccttgagcagaaatacccaaggcggcctgggccataggctgcgggaacgacttgggggtaaaagcgcggcaccgacaccagctgtgtgcagcagtggcggcggcggccgaaggagaaatagaacagcgcaggcaaaagaagaaaggcgcgggctgggtgggaagaggattcggactcgtcacactgcagagcagcagagcgagaaaggatgagaagaggcagagaaggcgacggcagaagaaaaaaggaaaaactgcggccgcgatcagagcctgaaagtgtgagaaggcggcgccagcgacgccagtatttatattagggggcgtggcctggtgacatcacagctggccgggcagccgcgcgagcggggcggaacccggttgcagcccggagaaaagggagggggacggaagaggaaggaggactgagcccgggagagagaggggaggggtcggcgcgcgaccgggtcatgcaggtgcagactggccggtcgcttcccgccctccagccacccgcagctccccggcaggcgaagggcggccgcgcgggtgtgggccgagagagggaggcggctcggctggagcgcgccgtccgcccgacccccgccgcctctcgggcgcctgcgctcacgctgcggggcccagcgcattgtgagccgggtcgagctccacgctggcagcgtctgagagctgtcctgggccggaggtggcgcgaaccctgtgcggcctagagtgggcctggggtaagcctgtcggcgccgctgccgagccttcgcgtccagctccctccgctttgtgaggcctgtagtttaccctggggagtgtcctcccgggctgaggcgcccgccctcggtgatgcggtactcctttagggaagcgagttcctcgtggccagaaaggaccggcccagtgtccgggtgttaaaaagggttgtgaccacgtgaaaatgtcctcagtgctcgaacgttgcaatacggtgcagtggaaattttttaaaggaatatggcttttatgtcttcatttttaaaaggattggtggagtcagtcccaagcaggacccgcgttggagaggggattactgatgttacaagcgcacattacttcaatcccctaggtctcattttcgcggtcgttttaatttttctactccacaacagacttttttttactaggggttctaagattacctacatagcttttaatttattttcatcttttttagatgcctcagcactaatgatcatgatcagagaccccgagttctctcgtgctgctacgcttcgcaacacatagcacaaatggaatatgtgttgacacacccctctgaagttaagatctttgatattaagaccctgacttttttccctttcattcttccgaaccctctgtgtactttgagcagcactgtggttgattaataaatcatcaaatgtgaaaggaagaaagcgaccttcctgtgtggaaaagcagggtatcttgcgaggctgtatgagagagtattcggtagaatcaggagctgtggacgcattcctgattttgtttttccttattttgctcggctatatcttggctctgtcttttatttcttcaaagttctgttctattcagaacatttgaaaacacagccattcactagaccctctctggtggaggaagaaaaactagagatgaatacaatatttgaaaccttgcttacaatctagcaggggaaataagacagcaatacaaaataaattgttggctgatacaaataaaatgctgcaaggaccaagtggagggaagagatgattgcagctaagtgagagaaaggctgctggggaaaggtaaagagtgattttgagaaaagcctttctagacaaaggtgcttcctttttcaccaaactcgcctgtttggtgattttgagagtagatgttccagtgttccaggcaagggaaacggatgagagaaggcacagaagtgggtgggtttagagaattgtgaatagcctttctggttccagcataggggcatggttgcaaatgagattgaaacggtagattagggtgacatcaagaagacattggaggctgggcgcagtggcttacacctgtattcccagcactttgggaggccgaggagggcggattacctgaggtcgggaattcgagaccagcctgaccaacatggagaaaacccggctctactaaaactacaaaattagctgggcatggtggcacatggctgtaatccagctactcaggaagctgaggcaggagaatctctagaacctgggaggcggaagttgcagtgagccgagatcacaccattgcactctccagtctgggcaacaagagtgaaactgcgtctcaaaaaaaaaaaaaaaaacaaaacaaaaaattggaacttggactttattctggaaccatataaacaggaacatgatatgctcaaaaatatgttttttaaaagattactccagcaccagtgggtgggattgaaaagaggtagaaagtttggaagtgaaggaaactcttacagcagttttctggggtcttttggtttacttatttatttattttagtactaagggggccgggcgtggttgctcacttggtggcctagtgatggtgtggtggcctagcactttgggaggctgaggcggacggatcacttgaggccagtagtttgaaaccagtctgcccaacatagcaaaaccctgtctctgctaaaactacaaaaattagccaggcgtgctggtacacgcatgtagtcccagctacttgggaggcggtggcaggagaattgcttgaacccgggaggcagaggttgcagtgagctgagatcgcaccactgcactccagcctgtgcaacagagatgtactttgtctcaaataataataataataatgaaagtactaaggggattcagaatggatgggagggaaaacgcacagagagagtagagataatcttgactttcaaaggagatgagaaggtgtcaagtgatttggggatattaagcttatcaacagggagaattctggagccataaacagagatagaaatagaaggaccctgccaggagcagtggctcacgcctgtaatcccagcactttgggaggctgaggcaggcgggtcacgaagtcaagagatcaagaccaccctggccaacatgacgaaaccccgtctctactaaaaatacaaaaattagctgggcatggtggcatgtgccctgtagtcccagctacttgggaggctgaggcaggagaatggcatgaacctgggaggcgtagcttgcagtgagccgagatggtgccactgcactccagcctgggcgacagagcgagactccatctcaaaaaaaaaaaaaaaaaaaaaagagggagtaagatgaggctaggtttttttgccttttgtgtgtgtatgtgacagtgtgtcacactgttgctcaggctgaagtggagaggcatagtctcgtctcactgcaacctccacctcctgggaccaagtgatcatcccacctcagcctctgagtagctggaactactggtgcaccaccatgcctggctaattttttgtgaagacaggtcttgcgatgttgcccaggttggttttgacctcctggactcaagtgatccacatacttaggcctcgcaaaatgctgggattataggcatgagccatcacaccaggcctgaggctgctctgatacagagttttagctgttgaagaaatagccaggtaaaaatggtccagaggcctctgaaaatggggagatctagaaccctttgggtgtgaatttgggagcctttcctacagacatgataattaaggaattattgaggtatagaagaaaagagtataagcacaggatctagagaatgccagagataaaagacagccgcagagaagaccaagaggccgaagaaaatgacaatagtgcaatgctatgctattcaaggaagagggtgcttatcgcaaaacgggatgagtgatcagggttgtcatatcctcaaacaggttggaaaggggattctgataaaagtttgggtttatcaatgctataggaactatatgccataggaccctaactcttatttaaatcaatttgtctctggcaaaattggttttgttatatggttaatggtttgacttaaagttacagtttccaagaacctatggatgacatcaaatgaggatgtactgtattaagtactattgtatattgtagattatggcattgtagcattatagtatattattgcagtcttaacagttgggagtataatgtgttttagttccctgccagcccacagaattattcagatgaaccaataaaattttgttttgaaattcaaggcacatctcactttcttttttttttttttctcctaaaagactctcgctctgtttcccaggctggagtgcagtggcatgattatagctcactgcaacctccacctcctgggctcaagcgattctctcacttcagcctctcgaatagctgggatgacgggtgtgcaccaccatgcctaattttttttttaaattttttgtagacatggggtttcaccatgttgtcagagctaatctcgaactcctgggctcaagcgatcctcccacctcaacctcccaaagtgttgggattacaggtgtgagccaccacaccaagcgtatctcaccttcttgatactacaaaaccttcctcagtcccctgtttgttctctttgctcccaagtgcaatccctgtgtgggcctgcatagcttacactactttcctcttcttgtctgagggaatgtgtaactaataaactgttgttgatctttaaagaaaaaaaaagtttgggtttatattccaaaggcgttggaaaaggcttcaatcatggaaatgatttgtattttagaaaaggtgagaaagtggggctggaaaggtaaaatactcttaagtttttggcaggcagaacatacgtgaagccattgtagtcattcatggagaatagcaagggcctggaaagaattttatctgtaacctttaacagagtaatatcagcagagtaggagaaacaggaagttgtaaagggttgagtgaggggcacttgcagtcagtgaatgttgacctctctttaagtagatgatactggactagagcctaagccaacatcatttgcaccatgaagcaactcaacaacatttattatgaaaagtatgtgcccacacaattagtatttttgtattcagatttaaagaataatgctagctttacatgaatacaatagtgctttgaaaactataccacagtaggccgggcacggtggctcatgcctgtaatcccagcactttgggaggccgaggtgttcaagaccagcctgaccaacatggagaaaccccgtccctactaaaaatacaaaattagctgggcatggtggtcatgcctgtaatgccagctactcaggaggctgaggcaggagaatcacttgaacctgggaggcggaagttgcagtgagctgagattgcgccattgcgttccagcctaggcaacaagagtgatactccatctcaaaaaacaaaaaaacaaaaagaaaactgtactacattggaatagacaacatagtgtaactttaatggaaggatagctatctaatgagaatggcatatttaactgtgtttggggttttagttattttgccaagtcaggttactcatacacaaatatgcaggtagtgccagcaaaaatattatcattaaatagagccctaagataaaataatataatactgttcctacttaaatcacctaggtccattgattcaaacttatatgcttttgtgccaatagatatgaaagattgaatgaattagatgattgataagggtaagtcactcaacataaataggtaaggctgggcatgataggtcatgcctgtagtctcagcactttggaaggctgaggtggggggatcccttgagcctaataattcaagaccagcctgggcaacatggtgaaatgctgtttgtacaaaaaatacaaaaattagccaggcatggtggcatgtgcctgtagtcctagcttcttgggaggctgaggcaggagaatcacttgagcccagtaggtcgaggctgctgggatcgtgccactgcactccagcctcggtgacagagcaagactcagtctcaaaaaaaaaaaaaaggtaaacaaaatcatcaccctataatagaaatctcatgtaaccacatatataaaagttaagagtttattggtaattgagagtaaaaatcccagtttaatggatgctatagtttgaatgtgtaccccaaaatgcctctgttggaaacttaatccccagtgcaatgttgttgggaggtggggcctcatgaaaggtaattaggtcatgagggtggagttaatagattaatgccagagggggttccttataagagggggagttcaatcctcttactctctttctctctgttgtcctttctttgctcttctactatgggatgacccagcaagaaggccgtcagcagatgctggcctcttgatcttggacttcccagccttcagaacgatgagccaataaatttctgtgcattataaattagctagtctgtggtattctgttacatcagcacaaaatggactaagacaataggaatgtttaaagatagcttcctataaatttttattgctaaggtaaattcctggaatactccttatcctgtagaaaaccaacatatatagatgttgaatagtaaaaacattcacattttaaaacatgatattttagccatccactacatcttttttgtgctccaataacctttctaaaaagccaactcacttaccaataatctaatgctatggtatttatggactagcaaaaatgtttcaaattacattgctgggtacagagtttagattatatactattctctcttttaactaaatagatgtaaaaagcctaacagatgctcctttatttgctgagtatctgttactaaaatcctgaccgggtgcagtggctcacacctgtaatcctagcactttgggaggccaaggtgggtgggtcacttgaggccaggagttcaagagcagcctggccaacatggtgaaacctcatctctactaaaaacatgcacaccaaaaaaagtcaaaaattggctgtagtcccagctacccgggaggctgaggcacgagaatcacttgaaacccagaggcagaggttgcagtgagccgagactgtaccactgcactccagcctgggcaacacagtgagactctgtcaaaaaaaaaaaaaaaaaaaacacacacaaatccttggagtcattttttgttttccttttaaaaattattttggaggcacagtcttgtacctcagcctcctgagtagctgggattagaggcatgtgccaccatgcctggttaatttttgtatttttatagagatggggtttcaccatgttggccaggctggtctcaaactcttgacctcaagtgatctgctcgccttggcctcccaaagtgttgaaattacaggcatagccactgcaccaggctagagttgtaatttctttacctggcttggctttcacctcagatgagaaatcattttatttaatataattgttatgtttaattcttttcacaaaatgtagcacttaggtcagtagggttctgtgccgttccagtctagagatgccctgcatcctagcactggctcatattcatcacctatatctttgttcacaggataatttaacctatggaatggtgtgcatgacaaacaaagggtgatagagtccagattaaaattcacatgtaagggaaaagaaaaacatttttcctattttgatttcagtggctgtgtatgccagtagatgggggtcagcattttccctcatctgagtgacttggaaggtttctgcaataaacaagtcataagcatacactgacgtcttttattacttccagaaacaacaaattactcactgttaatttaagagggctgctttagaaacctctgtaagaggccaaaggaataatccagttttacaagttaaatgtaacttaggtgatgtgtagggaaaactctatgatttctctctactctgacaccacaacaacaatcaacaacacgagaagacttctgtaaccaaacgtggttttttttttccccatgcaccaagcagtggacaccagctgggtgtcctctaattcaattctgacactatctacctgaagatactgtcagaacccacaggttgagggctcagtccccaagactgcccaccccgcaactccagtcattaagtccaggcctcctgaacttctgacctacaggcttcaagttggggttcccatgacctcctctttgggttcgattaatttgctagcacggctcacagaactctgggaaacacatacctgtgtttactggtttattataaaggatattgcgaaggatacagatgaagagacacatagggcaagatacagggggagggatgtgaaacctccatgccctccctgggcccgccactctccaggaacctccatgtgttcagctatctggaagctctgtgaacccagttcccttgggtttttatggaggcttcctgacatcagcattccttcccccagggtacagggcagattctttctgggaaaagtcttaaaacccacaatcagaaagatagaagattagagtcctgccttggggcaggtgaaaggagggcaggagaaggtcagaggcttgctcctgaggcttaacacacctcacattataacaaaagactgtaacaagggctgtaggagttatgagccaggaactgtggataaaaaccaatgtatatcataacaccacagattattagaataaacaatggacagatccatgagcttgctttggaagttagtaaatccttgtaaaattaatttcattttcactttgctaccaggcattttccgatgacaaatatattgtttattgcataatatattgtaagataggtttgtatctctctatctcaaaatagcgacctggcagctagcctaacatttttggttaagggcttagaaaatgggagctctgagattgagtcttgttgggtttgaattgcggtttactttatattctttcataatgtagcctggatgctatcacatgagcttattcttcttcctaaatgttaataatggtaactgcaggctacattttcttgaatgagacttttaagattactgtgtcatttaatttgatattttgcacgttttcttaacctttttatcgatataaatttgccttctctgattgtaactggaaggagaaaagtccatgcaataaagacaataagatattagttctttatcaaaatagggagaagagaaacataaacaactttctttcacaaaaataatctttttgtatctgactcaaaaagattatcaggcgaggcttggtggctcacgcctataatcccagcactgtgggaggccaagacgggcagatcacttgaggtcaggagttcaagaccagcctggccaatatggtgaaactccgtctttaccaagaaaatacaaaaaaaattagctgggcgttgtggtgtgcacctgtaatcccagttacttgggaggctgaggcatgagaattgcttgaacccaggaggtggaggttgcagtgagctgagatcgtgccattgcactctggcctggttgacaaggtgagatcttgtctcaaaaaaaaaaaagattatccagtcacctatgataatagcagttaaaagacttcagtcagtcctagctctgcttggctaagtgacttaactgtaaaccatctccatttgtttcagaaaatgtattttctgttcttttggaagtacttttccctttctattccctgagttctgttgtgagctgtcatcataacctgggcctccctggctaagtaattggtacaagggcttacaacttcttgcccaatcttgggagttagtgcagctcaataatgattggcacatgtttgattcagaccgttctctccctgggatttttctattaataaatggttgcaggaaggaagacttgaagagggaatcatttcttttccgtctcaagttatgacaatatgagtcaagagctgccagtaactggggttccaggagaaacctatgtgagaagatgaagccaccatttgtcatcataaggggtgggtcagcattccagttgtcccatttttcttgctcttcagttatacaaataaagaaaatttaggccgggtgcggtggcttacgcctgtaatcctagc

SEQ ID NO: 50 - DNA, 28135 bp, Homo sapiens
ttggtatcaagacactcaggagccttggttggatatttagacatgcctggggcagataactgaatggccaaggatggacagcccatcggtccagcatctgatccattttcactgtcttcaaggcaggtggcaggtctttgcacagtgagatgtgaagtggattgaggggtgaggccagtggtgtcaccttgggatgaagaaatgcttgcccactagtccatcaggataggcttcttgaaagagtagcaatttcgggaacaatgtgacaggtgagacagagggtttggttataggaaacggttattgagcatgtgctgtgggctggtgcagctctagaaaataagggtgaagagtggtgacccctgccctgatcatgccattgcactccagcctgggcaataagagcgaaactccatctcaaaaaaaaaaaaaaaaaaaaaaacccataaaatgtttttcaggttcattagtgttgtagcaagcatcagtatttctttcctttttatgaatgaataatatttcactgtgtggctatagcataatttgtttatagattgatggacatttaaattgtttctactttttggctattgtgaataatgttgctaagaacatgtgtgtacaagttactgtctgaacacctgattccaattctaggagtggaattgtgggatcacatgttaactctgtgtttaactttttaagcaacagcctgtacttctaattgcattacttaaattcaagcagtggtggtgagacaggggtaaagatgacatctgagagtacatactgttatttttcaatatttacaatttcttttcatctctttttctgaaagttgtttaaagtggaggagaataagctgagacgggccatcatctagtaaactgccccataggccgaataaactcctttgtactgtaagccccagcaggccagggatctttgtcagtttcaattcctgacatatttcaagtttagaacagtgaatggcatatggttggtgctcagcacatggctggtgctcaataaatatttgttgcatgaataaataaatacaatgaactgcctcaagtgtgctaaaatctcaagaaaacagacgtccatcaagtagaaccagaggagaatgggccgactttgtagccagaagtgcatggttagatatggtaaaggacttcccagagctatggggccctcagcccttggggaagcctcaacttcttcttttaacaccagccatgtgcaggtaattttacatatgtttatacggaagctctgagaggctgtggattccacagccaggcagcctagacggtggaacctgaatccaccccaggctgctggtcatgcaggccttgctcccactgtggggacagtggtccctccatcccaaggccaacgctcagccctaagaaggcctggggtgaggtcagcccaagggtacccaaggggccctcagaagagccgtggaaaatacatggtgcggccagaggaggaaggaaggatggcagcagagcatgcaaattggaagctgatatcgaattgcagcaaaatgagcagaggattagatgccccacctggacccaccccagagaataccaaggcttgggccggcccttgtgagaagctggcaggcccagtcccaggtggaagcctggcccctggcccgatgagcaggggcgatgaggcagggtggctgatcccaggcaggaagacaccactgatttgggtgaggccctccttcctgagccctccaccctcagcctgggcatcccacactcatagagctcctcctggttctggggaaggagcaggattagagccaagctgagaccctatcccaagttcctgccttcagagagtgcaggggagacggggataggaacacatccaaatgcccaggattctgagggggttgggggaaggggaagctgccttgactgagtaagtcagagaaggcttcctggaggagagcgaagggtgtggggctgggttgagatacaggaagatctgggtttgaattatagtttggctgcttcctagctgtttgatcttggacaaaactttcattcattctatattttttggagtgtctactccatgccaatcaggtgtgaaatgttgggataacaaaggcgaattcaatctggctctcgtcctcggagcttaagcaaatcatctggggtagcgtgacccatgctacgatggaggtggaatacggggctgcagggcggggccacaggacatagtgggcagcttaacctccttgagcctccctatccctaattcacgtgatggggtttgtaaccacttctcacatcgttgagagaaaagggtgagcctgactcagaggtgtggcaaaggaagggcagggcaggctttaaggacagggacagggctgtcagaggctgaggctagggaggggcaggaaggggtgtgaggcagggcggaagagagcagggccctgggcaggtgctgagccaggtcctgcaggtcacccagtcgcttgagtccacgaatgctggaggcaggcactggagagccagggtggttcagccgcagctcctctgagcagggagtcaaacaggtttgggtgacccttgtgagcaaggtcccggggcatcactaatttccacccccttctctggtaatgactctggtgcggcctggccctggcagtcacagctcctctctctccctatagggctgaaacagacaccagctctccaggaccagctggtaagagcttctccactgcccccgagccctgacaggaggactcccacagtgtgcatggaagcccagggagctcgggggctacagaggcaccattggctctggagcctgcagcccagacagccccctccagatgtaatgggggaaggagccagggactgggaggaattcagaggtcagaggaggagcagtatcaggagatactgccctcctgcaactcctcctcccagctgctctcccctcctgctagtgcccacaatggctcccagctgcctcctataaggaagctttattagcctgcagcctgtactcctccacgcagcagagctgacaggaccccattagtcagcttattcaacccttcccctggtgcacaaacccttgccaagcttttctggcattttgctcagcctgcttggaccctccaagcaggtaggaactcactgtttcacaaagcagtgttattagaaaggtttccctgaccctagccccccacatctaatctttctcaaatgtgggcagacttgttcctggccccttctcattccaccaatgcacacatgcacatgctccctctctccatccaagctccaggaatcaacctctaccctgaaccaggtccctgaggaccaccacgtggctgcaacacagcaggtgtggggcagggcacaagtgggcttaaggggggtataagggctggcagtttgctcattgattcactcaacaaacatgtactgagcacctctaaagggccagggcctgtgctaggcactgcggtgccatggtgagcaaatccagaaatggaccctgccctctaggagttcacagtccagaggagaagcccgatgctgaacagagaatcacatccgtgagcaacacaaaaggcaaggcaaaccctgggcagatgcccccgggactgtgtgttatgggcctacaggaagcctctcccaatgaaaaagcaatttttcagccagaacctccaccagtgtctttcaaactgtgagtggcaacccatttgtgggtcataaaatcaatttagtagttgtgacctgaattacttgttagtgaaatagagaggaatttacaacatcacacttaggaaatactgttttgtgaaatgttagtttcagttatctatctatctatctgtctgtctgagagatcatgtttattagttaagatattaaatgtatttcttactgcaggtctcaatcaaaaacctctgaaagccactggcctagagttagaggaagagttagccatgagaaatggtggtgacacaggttccaaaagaagaaacaataggtatcaggctcagagatgaaagggctagaaggaggacacaccaagttcaaggtctggcctttctcgagggcagtggggagccatgggaggttagcaagatcccatcttcttcatccctgggcctcaccccatgggcaggagggaaatggcaggaagttgtctttgtgtctccccaggagcctggacctgtggccttccctgcctccacctgggcctcaaccgtcacgaccacctggcctttgaggtagggtttggagaaggaagtcagcctattatcaggagaaggcttgaatttctatattcatagcttgtttctgtcacttactagccttgtgatcatgggcaacttgtctaatctctgtccctcagtttcctcctttgtaaaataggtctcatagaactcatccccaaaagtccttgtgaagatttagtttgtaagccagatgtctgcagacctccagtaaaagaatatgtttttggtattagtatgtatgtcccaaatattgcttggaatatgcttatacaaacaaaaatcatttgttttttatctgaaattcaaatttacctggatgtcctgtattttatctggaaaccctacacagaaatcaaatggctcacgctgtgtctcagagctgcaacgatccaacgccctccatccttcagaggctgtctgagtccggggacacaactcccaccctcctctcctgccagccgcggccggtggctgctctcttcacttcgtcccgcttcgccccgactgtggatctacccgctcccttctccctcagtccccaaagcaccagactcacaggcctgctgtgtgacccacttttaccgacctttcggggagagtagagggcatttgtgactcagctcagagcaggaaacacatctcacgtcaactgtcagacagcgctgctccgaatcccatcacagtgctccagcagggggcgtcctcaccggccgcggccacagccacggctcaacccggcctagctcccagacaccctccttccaccgcctgttttccaccgtccccgcctgctctttcaagccagcagcaaacaacaccctaatccgtgtctttattattcaaagaccttaagcactctttcccacctcgttcccatcttgattatttcagggaatgaattagggattcacctttacaatcaaaaaagttctctcaaagccaggctactggagttctaattctgccttcccacttttactagctgtgaaatctcaggaaagttacttaacctctctctgtctcattttcctcatctttaaaaaacaggatgataatatttagctcctaagatggttgtgaggatttaagtgagctgatatatccaagaatgtctagaacagcgcgtggcagaatgggcattgcatatgggtttaatcttgtaactgccatgtttcaccaattctaaggtgtatctcgtttctcatcataagagctcttccgctcgtgtggcagctgggagtggccgtcattgcctgcgcatacctaaacttggtcaggtgagttccgtgccttcagcttaattgctgtttaaaatgtcttcaaaaaggttacactgtggtttagcatttaaacccagttactgtgtatgcagaaaggcgggcaaacagaagagtgtagcaagaattttatattagtgaagcagttatcattgaagaatgaccacagtttcatattttcttgcaaaacagcagccaagtgttttgtgagacctaagaaaggaagagccccataagtaaatggaactgttgtgttgttttattaccgagaaaagggcagaatgattgctagtcacacgtgaagcaagaaaaccccggcaataaagcttgcagaatgagtggctgaggcttgaaaataaatggtggaaacaatagtggacaatcttttaaagaatggcacattgccaatgctcctgatggcacagaaggtgacaccatgcagaaaatcaaggctctgagtcaaagagggtttcagaaaaattggactctgaatgtgaagaaatctggggactattttagccaatttgttttgcctataatttccttttatgcatgcaaaagagcaattctgactttaaagactgatatctaaataaatctaaaatatcttttttgtgtgtgtgtctgtgatacagtgtctcgccctttcacccaggctggagtgcagtagtgcaatctcagctcactgcaacttctgcctcccagtctcaagcaatcctcccacatcagccggactacaggtgcacaccaccatgcctagctaattttttgtgagtattttttgtaaagatagggtttcaccatgttgccagactggtctcaaactcctgggctcaagtgatccgcccaccttggcctctcaaagtgctgggattacaggcatgagccaccaagcccagcctataaaatacgcataacataaaatttaccatcttaactttttttttttttttgagacggattttcgctcttgttgcccaggctggagtgcagtggcatgatctcagctcactgcaacctccacctcctgggttcaagtgattctcctgcctcagcctccgagtagctgggattacaggcatgtgccaccacacccagctaattttgtatttttagtagagatggtgtttctccatgttggtcaggctggtctcaaacttccgacctcaggtgatccacccacctcggcctcccaaagtgctgggattacaggcgtgagccaccacgcctggccctcatcttaaccatttttaagtgcacagttcagtggcattaagcacattcacattgctgtgaattcatcagcaatttttgtcatgttctaattaatagtgcatgatagatgcatagacttcctaagaaacagtgtagtggccattgtagaaaaaatgcagccatccctgcaggtgagcagagctgccagccagaagcacagccaagccccgccagctttgatgagaacaccttcttcctccctggcatgaagggaaagtcaaatgcaaacacaggcatgagccgtgtcatcgttggccccttcccctcctcccagactaggggccagatcagaatgtgagtcctgactactattgtaagctgtgcggcaggtcacactctctctggaattcatgttctcatcatggaaactgaaatccacaggcaagatgatctctaagatcccattagcttctaaatgtatgattgtgtaactgaacaaccacacaagacacacaccacaaacatatgcaaattcgggttgggtctttgtgggctccaaggagaagctgtcacacctatcctggtgtattgggaagcaagagatttttacccgactgggttaggagtggttcttcccagaatcaagggtcagtaggccactctgtcaagatcgtgaataccttgaccaaaggagagaccagaaagggtgtgtggcccatccgagagcacacagcaactaaatggttgggtgtggatttagaagccactgtcacagcttcagttcacatgaggcccaaggagaaggttttccaggaacccctgagactcagtcctgaacttggccagttggggtggacagtatatccgaaggtcaggagaagtgatacatgaaaccacaaaagaaaggagtaggccaggcacggtggctcacgcctgtaatcccagcactttgggaggtcgaggcaggtggatcacaaggtcaggagtttgagaccagcctggccaatatggtgaaatcccatgtctactaaaaaaaaatacaaaaagtagtcgggcatggtggcatgtgcctgtaatcccagctactcaggaagctgaggcgacagaattgcttgaacctgggaggtggaagttgcagtgagctgagccactgcactccagcagtggggaaggcatgttccctgggtgggggcagaggcacaccccagccagacccctctgagtccttgtctcttcctatgtgcagagtctggaggtgggccccagatgccctttatatgacaggggttggggtccccctctccgtcgatcttctcccggaggacccagaatgcctgaagttgggagggatggctgagggaagagtgccagggcaccaggtgtctatgtgtcaggccaggagttaggcactggaaatacacaggagaacaaaccccacaggaatccctgctcttttggaacatcacttctgtatgggtaatttttattctttcttcctccccttcctcttccgctttctcttcctcctccttcataatagcaggagtcacgagtccccatatatatatgtatatgatacattctcagttgcaaaataccttcccgttcattatcttactgcattctcaaaacaactttatggggtaggcatccacactcccattgtccagacaaggaaactgaggcgcagaatgtggctcggtagtgtggggtgtggcagaaagctccagaccaggctccagtcccagctcagccactaacctgctggagcaccctagataagtcactcccctccctgggcctatactcacccctcctgcccaccccacatccccatgatacaacacaaagcgctccactccagtctccaatctctcccagatttctgttcctgcgactgtgacttgcccagggacctgctggacaggagctagggcagggtgcagaagcccgtccttctgtccccactctgagcctgaccctgctgtgaatccccaggagagggagcgaggctggagggattagggaagggccagtgagtggggctggggaaacttctagacttgaacgcctccaggaccccagtggccacagcagcactgatagcaggaggcagcactgcccagatgctgagctgagtgggcaccaaggccagagagctgcttatcaggcatcacagccgccccgagcctgcacagctcactgccccacagaaatgtctttctcctgtggccagagcggccctgagctcctcagggtttctaggacctgtcacagcttctgggaccccaacaaatgagtgtgcaaagacctgttctcctcaaagtgcaaataatactgtaagtaagggctgatattcattgaccacctactgtggacgaggcgctgctctgagcacttgacatacattgtttcattcaatccaaaccccaatccactaggtcagttttattctccccattttacagagaaagacaagaaaggttaagtcacatagatggaacaggctgatgccagaatggacaccctcagcttcctcagccgccccaggttgactccatcaccaagggccagggtcccagtgcccccaggctctaggagctgctgtttggctggggctcccaggagaaggtgaagcttaatgatttatgggtgattagctgcaagaatgcaagcacagaagacacaaacctttatgccttggaaatttgtcacaagccaaccagttgttttccatccctgtgaagcaggaataattggaggtctgacagaagaacttcccagttaccagaaggagcagcactcatgttctctcttagttttgtgtgaggtgttgcccctgccttggtcaacagtttgagtcagagagatgggggccgggcacaatccccaccagacgttcccattcacaagaccctgtgggggctgggagacgccctggggcagcagccctggggtaaccaagggaacaaacacggaaaaccagggacgtcagtccttatctggagctcattaaatggggaacattagtcagctgtgaaggccaagatagggtgataggcctgtgggtgggctgggatggggcatgggggcagaggccgccatggaggagaagaggtattggcctcaacgactccacctccccgccacgtgcccagatccgggatggaaggaccctataaatgcccacaacccagcctccccagaggccttgagaaagagagcgatagagtgcgagagcgagtgcccggagcatcctggccctgagacagctgggccagccccgcagggctctgcagcatgtgggagctccgctccatagccttctccagggctgtgttcgcagagttcctggccacactcctcttcgtcttctttggcctcggctctgccctcaactggccacaggccctgccctctgtgctacagattgccatggcgtttggcttgggtattggcaccctggtacaggctctgggccacataagcggggcccacatcaaccctgccgtgactgtggcctgcctggtgggctgccacgtctccgttctccgagccgccttctacgtggctgcccagctgctgggggctgtggccggagccgctctgctccatgagatcacgccagcagacatccgcggggacctggctgtcaatgctgtgagtagccacaactttgccatccacaaggggcaggtcctggggaatcccttgtaaaggatgagatgggagggatgggctctgggtgatgtagggagagagatggagacagaggcagagagagaggctggagccaggaacacagccaccataggagggtcaggatgaaaggagcaatgataccagagcaaagcaggatgcagacagactgctggcttcttccaccctgaccatcgtgcaggaagagcctcatccaggtttctgttggactcaacgcctacattacagtgaggacagggctatacctcagcaggggttggtgtcccgagcagacatgctttccaagctgcggggagccttggagtgatcatcacagggttctcaagagagaagaggggcccagcatttcttctgctttgagggtttgcaggtcccgtggcaggtgctccttacaggccaggcacggacacaccacagccctgcaagcagcaatgggcatactcacttctccaaaccttgaggaggtccccggagcccataagctggctgctgattacatgatacaggcgctaactgggccccgtgggccctttgggagctgagggtggtgccacagtcccttcccccatgtcccacccacttcccctctcaggtctgtgtgggccctgtgaatccaaggcccatgaatgtggaggaatgacctgtgcccccaacagatcaacactcactctgtacccccatcctaagccaggacagtgagtgcctcttttgtgcttgtttccggtagttcccggccttttccatccttgagccactggacaagagtcctgatgtctttgatgagtcccgcacaatctctgtgggcgcccccttctctgcacaagtggcccttcctcatctgtgggacagaggtatcccaattagggaacttctctgctttgttttgttttgtttttgagatggagtctcactctattgcccaggctggagtgcaatggtacaatctcaactcactgcaacctccacctcaggccattctcttgcctcagcctcccatgggattacacgcctgtaatcccagctaatttttgtatttttagtagagacaggactcgccacgttggtaaggctggtttcaaactcctaacctcaagtgatccacccgcctcagcctcccaaagtgctggaattacaggcatgagccaccacacccagcctctgttctttaaagaggaaaatatgacaaggctgggggccaggggccaaggaaaggctaggtgggcaagcagaggagtgggctcatttcctctgagaacaaaattagttcagtttgcagcaagaagaggtccagttagactgaaaaaggaacttcctgagagcatgaccaggaagtccttctctaatagcagggcactgggagtgaaaggccatgggaaacatgcagtcctcctcctccatcatttcacaactgactggggccctcagaagagaaaggtctgggagggctcctccatgccacttctcagcatttaccaccttgaggacctggggagaaccctgcctggatggaatggggcagtggtgggaccaacttgctctgaggctaaggagagccagatgaccctcaagacaatcccaagtgtcctttgaggacactgagagccagcctggccaccaggaagttaatcattgacatgcacctgccctgtgccaggccagctatcatctcatcattggtacaacgctataagggaaattctgtggttccccctatggtgagtggcaaattgaggctcaacagcaattgatcaaagtcacagaaccaatatgtcatttctagtcctcccacagtcctccagaatccattttcttatcccatttcacagaaggagaaactgaggccaaattaagtagtcccacggcaagtcagaggcctccaaagtgtctgcttccaaagctcttttcactgtcctctagagactctgcattggacaacaataggagggattgaggttagaccctagagagacccaagggttctgacctgatgtctcggacccaggggtgggggttcagggcctggagaaagagcgtgggagctgagagctgtcactgttccacccagtgcagtgcccagccccagaaggcagggtgtagggtacagggtgacaaaacccaaggagaaatccagtgctgggtgcggcccagttatgaaatcacctctttactcagccccgagttctctccttacccaaggcagggtctgctgagaccatgggcagcctacatgggtgtggaggcattgtccaacacagctccagggcccttaccccaacctccataggatgtgcagggagcaaactaacagggcaaacctgaggcctgaaaggcagtggggaatagacaagggttagggaaagaggtagattccggactcatagcggaaaggggcacactaggactgtcccccagacccaagtccctagaccctgtctctgggagccatttaacctcaggaagaaagaccacaggcctctcattgcaccaaggtctgatggtctagagacagaggaaggtcttcctgctaaccggcccaaagcttcctgaggcagttgaaacctcttcccttcttgttctttgggaaacagaaattccggatctcagcattcttttcctctcatactgcaggctcccagcctcaggccccaatctaatgggctacagagtcagttttgctacctctggcggggggaccatgggcatcctgggggatcaggggctgcctttgggccagggcccaggaagaagggatcagtcgttgcagctaaggcgtctggcaagcccaggtgttccggctcccagcccagaggccccctggtgcctcgactgcaggtggacaggaagatggagccagagaggaaagtgggctcagtgttcccctacccgcctcttctctgtccccagctcagcaacagcacgacggctggccaggcggtgactgtggagctcttcctgacactgcagctggtgctctgcatcttcgcctccaccgatgagcgccgcggagagaacccgggcacccctgctctctccataggcttctctgtggccctgggccacctccttggggtaggtcatggccatgggttccagcctccctggaggaacagacacacagaccactccagagacagacacagagaccccaagagggacacatacacagaactctcaagaggaacagacaccccagaggtttgactcctagataccccagagggacagatatcactccagcccatctgtaaataaaacgtgatgttaattgtccatcacgtgggttccctttaggctgaggtcaagcactgcagtgcgggacaaggacttcctgccctgtcctcacctcccttctctctttgatgccctcctcccactgcagatccattacaccggctgctctatgaatcctgcccgctccctggctccagctgtcgtcactggcaaatttgatgaccactgggtaatggctgaaaccccctgccctccccttctctagaaacccattttagagggagaacaagagctggaatagcatgggatgggggctcagcagcggtaccccaaaccctccacactcctcctggtcctggggagccttgggttccacccctcagatctgatgccaaagactcagtttccatgtctgtgaatgaggatgacaacagcttacctcactggcttcttgggaacagtaagtgaggttaccggtgtaacccagataatgcagtgtctggcacttagaactctataagtggtagtatttagcacttatctggtgcttagtatgtggtgagccttgttctgagtgctttgcaaacattaactcagttttcacaaccaccccaggaggtagacattcttagagtgaaaggcacagagagggtaagtaacttgtcgaagtgcacacagcacttaagtggtggaatcaggacacacacaggcagtggcttcagaattcgcacccttaaccccgcactgacaaggcttccccagcagctggcgttgtcgttgtaattacataaataagcattttactagattaatgtcggggaggaggggtgcggccgcagagtgtgccgccggggcctgcgggctccgcgtgccggtgccggcgcgggtgccaagccgccctctccgctcgcccccaggtcttctggatcggacccctggtgggcgccatcctgggctccctcctctacaactacgtgctgtttccgccagccaagagcctgtcggagcgcctggcagtgctgaagggcctggagccggacaccgattgggaggagcgcgaggtgcgacggcggcagtcggtggagctgcactcgccgcagagcctgccacggggtaccaaggcctgagggccgccagcggcctctacggccccgacggacgcttgtgaggcccgaggcagaagggcccaccccgtccctcctctcccgcaggtctgaagttggccccccagcgcagagtagctgcttcctggacgtgcgcgcccaggccagtgctgtgagcaggcggggaggaggctgccggagggagccctgagcctggcaggtcccctgccctgaggctgtgagcagctagtggtggcttctccagcctttttcagggaactgggaacttaggggactgagctggggagggaggcaggtgggtggtaagagggaaactctggagagcctgcacccaggtactgagtggggagtgtacagacccctgccttgggggttccgggaatgatgcaactggttttactagtgtgcaagtgtgttcatccccaagttctcttttgtcctcacatgcagagttgtgcatgcccctgagtgtgaacaggtttgcctacgttggtgcaagtgtgcatggctggggacttctcacttccccttgcaccccttcctccccaacctgcaataaatccgcttctcctgcagtggatgagtgtgggtgccagtcctcctcaggagaaggggaagggaaggaggccactttgagagggctgaagggagggccttgatttccagccgcaatctggctcctcctggaaaatttcccccacctgcagcgctgggccccaaggcttgccaagactcattgctggaggtagagaggtgtcaaccagagaacagctcccctagacatggcctctggaaaaaggaaatctttggtggccaaagatttcctttctgtggtgagggagaacctctccaaagaggaagcaggcatatgagtgcgcacgccttcacgtgtgtgtatgctgtgtgtgcccgggacccccgtctccaggggtgccccagacccagagattagcctcccacttcggcgcagaaaacaaaagccctttgtgggacccgggcctttgtcttgggtgaggggagatttgcacctagacacttcttgaaaggagacactcagtttcacaagtgagccctcttgcccagcacacacctatggctggctgggcaaggcgctcaggcatgcaaccatgggcaccaggcaatacccatccatcacccatctcactctccccagtcctcaggcagcagcttttccaccccaggaatctctgttccttctctgtctgcctctccacagcccgtgatcccctgcttctggctcctaccactggacagtcattgtggatagagcagcctgctgctctcaggaccagagaagggaaatgacttctccaggcagaggcagatctgagtctagaacccaggcttctaaatttctaggccagtactactgctctcaaaagagattaactgggattaagtgagatgacgcatgtaaagatgctgtgtaaactgtaattcttaataccattatcacgcattactagaatcatttcattatttctgcttcctgggggaaggatgcagaaggagtctgatgctcaacatcccttacctcctttcgctgatggccaaagcaaaggagagtcctgggagcccacaagatccaggcagaaggagatgggtttggggctggccccatcctggcccagcctcttaacctcttcttaccctgaatgtgtgccctatcttttctcccacctccttcctcctaccacccagccctatccattctctccttccctctccagcctgctgtataagtaacatgtgggtcataccttgaacccccctccgcccccatgctctctgtggcctccatgccttcaagacttctgtctgtatctatctcacactgcaccaagcacccactgtgcaccaggcactaagtctctagcctctttctcccttctgctcccatccaagaaagacagtgtataaggaacatctctgtaattgtgtcccctctcatctatgctctttcctgtcttccttgaccaaagctctctttgaggtccaaaaaaggctgccctgggccatatgtgctatggagaggactctcccaaacccccaatagctagtgacagccacttggcctcactaccagaagaagggtggagtcagaaaccaaagtgacctccagagctgtcctcctggcacctgagtgtccttgctctagaggttcaaaggcagcaaggcagtgagctatgagcccagcatggatgtgtctcaggcacctcatccccaccccacctcaccccaacaaactcctctagaagaagccaagaatttctctctatgtctgtttcactttttggattgcatctccccaaaaactaaatgtgaaatccctaccatttctagcctctattgcccagattggagtcagaggtcaaaaaaggattccaagtgatggaactccaggggtggagggaaattggcagttcctggcatctcttgtgtaccagctgctgtgctgggtgccttgcatgcacgggcttatctgatcttcctcaaacttcagataggttagggaaggacaaaggcccccagccatgaagggttttgctatttccaaagcttccccttatcgtcccctgtgattatctcccaaccccgtgacaaaggtagagcaaatattgttcttcccattttacagattcagaaaccaaggctaagggactggtctaaagtctcacaggtagtatatggtggagccaacacttgaactcagacctttttacacaaaatcccatgatttttccactgagacaaatcctaggctcctgggaggccctggcagaagccagaacacatggctgggcctttccagcccaacccactgtcttgcagtggacggagagccttggcgagggcagcagggtagagaggacaaagaatgtggggctggtttctgccctttaagagcacccggtcagtcagagaacagagatcacacacaccaaaccagacagaggcagggcagcatggagacaggtagacagacctccaggtccctaagctggggacagagaaggttctgagctgtcccatactcccactttgtgccaaatgactttgcacctgcaaatggtgcttcaatgtcgttttgtatctttaagctgtgatgttgtatatatacaatgcctcccagctagactgtaagccctttggggacaagggctgcttccagttcttggatggcgttctcctatctaccttccttcaactgctctgcatataataagcactcaataaatgctcatttgccaataagtactgtttcttccacaacttggcagtggtaatagaaatacagcccaaggtaccagaagacaggcggagctccctaccacttctaccccagccctcaacttctcccagggaactcagaagtccccatatcaggagaggaggggaagggctctccctaagacattcaaattccccctgccacaaatggggagacccatcactcagctcacaaaggtcccgggcattcctctggagctgccagggcagggcctgagtgcttgggcaaagagaattccgagacataatgggagtttactgtgatgacttgaggacagagggactctagtggttagagagatggaagagcctaagacacaggccctaggaaacagaatcagctgccctgtgtgagtaaccttgacagatgaaatctccttctttggcctcaccaggcccactcctgatgaccaagtctatgtggcgacctgtggttcccatctcaggtcactgtgtgaccctaggcaagtgacctctgagtctgggtttcttcatgggtagcttggaatcaaatcacacagtggaggccaattataatctctaactttgtagattatattctgaatctctaaaatggcaagaacaaggtcttggcctttatagtccctcattagttcaaatcttcaggtcggagcttcccctggcagccaagcctcttgtgagcacttgtgaatcctttcattctgagatgctggagtttgagacctgtggactatgaagacagtgcctggggagagaggatgagaaagcaagtgaaagggtgcgaactggaggcaagttcagcagcaaaggagcctggcccccaatggcctctggggtcatcagggtcattgtccagcccaagtcccaggcccagaagaaaatcctgcgtacaactggcatgtacagctggcatgattggctggggacaaagcgctgggacccatggaagaaaggacagactgacctccggccttaagaggagagacctgggggaggagctgctccagcaggaaatgccagagctgggcaggaacaatagcggggtttctttagcccttgttttctttggcatcttagctgccacagagcccagagcccgctcctccaagtccttagcattcctgcaggctcctcccctcagccctgcctgacaaactgacagaggaggcacctgttctctacttcctctgcaccctcccgctggactcttccccctagcttagcaccacactaaaccctcaaggggcttttaaaattaacagtcacaacgtaaggagactttactgagccttactctgtgccaggcactgtgctaagggcttctctaacacacatggggatgggagtctttaatgcagctcctctcccgggatcctgggggtgggtcctccccctctaagccctagagagccctccagcctcgttctccacatgcccgacctggagtgggtgggaagagggagagggtggtgtgcgaggaggcagcaggtcacaaaggggttacaagctcagagggaagggggatgggaactggaagaaagtgtcacccagaccaggggtagaagaacttgactttggggagactgagaaagaccacatgtaagagagagagacatggaaaatgaggtagaaacagacagaaacaaagaaaggcacaaaaattaagaggcagaggaaaggtgaaaatagccaggagacagaaactgcaggatgagagaaatgaatagagagagacagagagactaagacagcaaaaggcaggaaggaaaaacagaaaatgagaaggtgtgagagagagagagatggagaggtggagaacagagagactgaaatgagaaagagacctctcggagagagaccgagaggaagaggctggcagagggagagggtcagagaccaaagacagagacaaaaagagaaatagggttttgcaaagactgactgacagaaacagatttcgaggggagagagatcaagaccaagtgagggtttgaaggagacttaggggaggtggaggaagagaaggagagtcttagatccagggtgaggggcttctagcaggaagagggaagacgccaagaccgcgcttgggaggtcagtggtgcgtctctaccccccctgctcccccactccaactcccagagtctcaaggcctcacgtcacacccccgtcccgtcccgtcgacaaggggaaccccggcctgggagagggcgcctccggggatccgttgcctagtccaggtactgcccagctaccgggcgtcgaggattgcgaagcgtcggggcaggctggcacggtgcccacttttcccaaaacgccagccttccaagcccagaagctcgcccggcccaggccgggagcggcccacgtcggacggccggaccgccctgcaggacccagcccggccgcccgcccccgccgccggcggtgagggaggtgagcggcgccgacctgcgggacgagcatcactccgacccagccgggggtgaggcgggtcaggatgctccggtcgcaggaggaaaaggaggagctggaccaaaagcccgaagagaagaaaaggggaaggccgcgcacggagcgcggtaaaggccggcggagctagacgccccgaggtcggagtgaagcgccgggaccgagccccgtctcccagggagtccggggcgcacggcaccgaggagagcgcgggagccaacctgggcgcatcatgcgcagggcccgggacgctgggccggtctacaccgccgcctgggtcacgtggcccggacgggccggcggctgccccggccggggggcgggggtcgcgccggggttgcgctggacgacggagagcggcgggcccgcagcggcctggagcctcccaacccgcgcgccgcgctggcccccgagcgtaggagccgccccctgcccccccgcgccggccccgcgcccggccgcccgccccctatatagcgcgccccagcagggcccgcgccaggccgccagcctcggagtgggcgcgggacagtgcgcggcgccccgcagccaggcccccgcccccgccgcatccacctcctccgccgcctgcgacccaacgggcgccccccgccgcggcagctgccgccgggcccccgcggccaccatgaagaaggaggtgtgctccgtggccttcctcaaggccgtgttcgcagagttcttggccaccctcatcttcgtcttctttggcctgggctcggccctcaagtggccgtcggcgctgcctaccatcctgcagatcgcgctggcgtttggcctggccataggcacgctggcccaggccctgggacccgtgagcggcggccacatcaaccccgccatcaccctggccctcttggtgggcaaccagatctcgctgctccgggctttcttctacgtggcggcccagctggtgggcgccattgccggggctggcatcctctacggtgtggcaccgctcaatgcccggggcaatctggccgtcaacgcggtgagtgccctgggggggtgggagcctcgaccctggggtgggctcaggaccaggcctcttaccccacctggaaaaaaggggtgccgcagagtgggccagcccacacccttcaccaggaaggcaagagcctcccaaggccaggaaggcaactctccaggctgatatgtgctcccttcctgcccacctcctctccccctcccctcatgctggcccaccctggtctctctccaatgcctgctacccctcctctcctgccagaaacttctgcctcctcctgtctcacctttgagctccaccttcctcctgggcccctcacctctcccatcacctcagtggagcggttgagtagaaccaccagagaaaagcgggctgtcatcacggctttgggtgaccctggcctgtctgtgcttcattgttctcagcgcctccatggggatggttgtgtctgccacagcaggtgtcaaggggctcacatttagaaaccgtagataggaaccccctaatgtggggccagtgcagagcagtttctgttgagtattggttccctctttccccaacctgtgctcctcccctcaaccccgcacccctgcctccctcccacctcctgcagccccagagtcagcccccaaccccatgcaaactgggttcattaatcaaacacagaggaggatttgcttggccattgtcaagctgtgagtcagccgcactggagagacgggtttaaggctggcactggcatggggccaggcacgggcaggaggccgggatggggtgtgaggcaggcaaaccgggcagctgcccacaggatggagggtaaatgccagcttatgggggctgggggttgggcagagccattgataggcccgtgtccaggaaaagctaccctgacgctctgccctttggccacaggcctgagcttcaagcctgtgcaaactatgaaatgtacagtgtctttaacaaatggcttcgctggggcgatgtccacaggacttggcttccaggtgccaaggtgctctaagtgtccctggaggccaaaagccctactccccgagcccctggctatacagccagaaggtggccggggtcctaacccgctatccccttgcagctcaacaacaacacaacgcagggccaggccatggtggtggagctgattctgaccttccagctggcactctgcatcttcgcctccactgactcccgccgcaccagccctgtgggctccccagccctgtccattggcctgtctgtcaccctgggccaccttgtcggagtgagcagtaccgacattgggctggggtgagggtggggcaggcactcaaggcaaataatggagccctggagcggagcccacttcagatggatgagtccagcagagtttaaggcctggatttagggctcctggactctggccctactgggccccagaattgatccccccaaaacctctgggctgaggaaagatgggagtaagtaggaggtgggatgggacaggaatcaaacccaacctcagagcagagaagagaggagggcgtagttaagggtccatggttaaccaagcagctgggatccttggagggagaggttgccagcctgagtttgagacctggctgagcccctggactgcagtgtaaccttgagagagtccagattctgtgggagtggaccaggatgttgcctttctctccaccgccctgtctctatccagatctacttcactggctgctccatgaacccagcccgctcttttggccctgcggtggtcatgaatcggttcagccccgctcactgggtgagtctgtcccttcccctggctccctggagatgagggcctggagacccagcagtggcagctcagagctcaccagacctggattctgtgggtctagagcttgggggtgggccagggagtggtggctgacagagaaagggacacagtaggggatgggattcagctagaggggcagaggtggctttgtatggcctgaaccgctggggacagggagtctgagtatctatccgcttatggaagaggctctactgaacctggaggtgcagaggggctctgtgtcaattcccttgaggatttggtgtccgtccccctcggtgtctgcgtgctggtcctctctgatgttttatttatctgtccctgttgagggggttgggagagtcttcctgtgggtctgtccctgtggacagtctgtctgccccccctttggaagctcatggtcactctctccagggtctgcttctatccctgcgtggaggggacacgcgctctgttcatccgtctctctgaggacccacgtgtcccctctgaaggtttatttgcttctctttccggtgtggttggagggagcctgtccctctgggaatccgtttgccttctttgagggtctaggtgtctgtggtccatgtctctgtccctgggagtggtgtgtcagtatattcgtccccgaggtgggaggaagtctttctccctgaaggtctggaagtctgcatgtctgtctcctctcagggtccgtgggtctgtcctctgtggggtggggggcatgtggtcttcaaggtctggggctcagcgccctgactcctgccctgtctccaccaggttttctgggtagggcccatcgtgggggcggtcctggctgccatcctttacttctacctgctcttccccaactccctgagcctgagtgagcgtgtggccatcatcaaaggcacgtatgagcctgacgaggactgggaggagcagcgggaagagcggaagaagaccatggagctgaccacccgctgaccagtgtcaggcaggggccagcccctcagcccctgagccaagggggaaaagaagaaaaagtacctaacacaagcttcctttttgcacaaccggtcctcttggctgaggaggaggagctggtcaccctggctgcacagttagagaggggagaaggaacccatgatgggactcctggggtaggggccaggggctggggtctgctggggacaggtctctctgggacagacctcagagattgtgaatgcagtgccaagctcacaggctgcaagggccaggccagaaaagggcgggcctgcagcctgcaccccccaccttccccaacccttcctcaagagctgaagggatcccagcccctaggtgggcagaggcagaccctccccagagctccttaggaagaagacagactggttcattgaatgccgccttatttatttctggtgaggatgcatgcgtggggctgctggtgtttagagtgggggctacccaataaatcactgatactcacgttccgcctctgtctctcctcagagtgccttgagacactctggcccattgcctctcctctttgtcatcccacatcctccaccacgatctccacagggtaccaggggaccccaggacaagtgctctgtgggaagaaagggagactgtgaccatgggaggcccagagaatcagagagatgggaacagagcagggagagactgagagaagaccgaatatcaaaatagagctagaggccaggaaggaggggtcctcactgcagtcaccctccacccctccccctcagccatgtcaatcaagtccctgccacttgaggagggcttggctggcacttgaggggagtaccagggtgtgacaggcagggcggaggagtgagccaaccgcagcccctcgagatggcaagggggtgaccagccaggttccatcacagccctgggctcgtttctctgcaccttgatctttcaaaaaggtgtcctgctgggagcctgtgcccagagggagcagccccccgacccccccagaagccacatgtggcccagcccccttttccagggcttctcatgccttggcccaccagtgtccccaccgtcctctcctctgggcctgagctctgtcctagcctgctcttgtcccactgtcactgacactccttaggtaacctccttaaactctcagagcctccctctcttcatctgtaaaatggggataaaatatcactttcctcacaagatagttgtggggaccagatgagggcatgagatgcctgggaccagtcagctttctgtgaggaaaaggcggggggtcatgcagtgaacagctccgcatagcccagcttcgcagtgagcccagcctggagtcagtaactaccctcattccaatctggccgtgaaacttggggcaacataagctctctgagctttaaggaccttatctgcaaaacaggggtacttttcccgacctcatgtgctatgtgctgtcgtgaggagaaaatgagaccacgcctggaggtaaaacgcttgtacaaatggtcaggcgccttggagtgagtgctcagtatagtcgtgttaatagaaacccacacgtgcctgcctagtctgaggccccagccacatgcttctgccctcctgggggtgtgtggacctgagcgcctgtccagcggggccaggagacggactgagaaggggtaggggaagctgtagttcttggccagcgagaggcagtcccaggggctggggtgaggagtggcagaccccccagccttctccacacttagagtctaagcatctacaagtgagaggtcagccactcatgtccgccccataggcttacagtaaacaccacgtggcattgcgtgtgagaaccccgggagcccagggaaggagcagccccccacccaccgtgtcccttcccacttcttccaacctgccccgggctgggggagccgggctgcaagtgccagctctggccagcagagggcgacgtcgtccaccgaatccacagcgtggcgcctcgtcgtccacaagtcctgggtctgggctctagccagatgggggtggagtggaggacacagggagtccctcatgcttgagtcccctggggccaccttgaggcagcctatcccaatgcatccccgccccgctatccgggtggggcgcagaagagaggggagcccttctccgctcagtctccaggagactcaggtacagacacagccatgaccaggaggatgggctcttcctccagcccaatgggggccacggcagggtggacagtggacccttgggagacaaacccgcgggggcaggcaaggcactaagtcagagggggctaccggccctgagcttcctgcaggttgcctcgcctggcccttgggcaggcttccagctagggcttggggctgacaagcgccgtggttggggcggtgtggccagcaggggtcgctgtgtctgcgtgtcggatcttgcaggagcggcaggtctgcgggctcacaaagtcccgtgcacacgcgcgcacacacactgaccccacacagtccggggctcgcggccacacactgacctcagtcgtgcccgagggctgcatgttccgggtgtgtgcgtctcctttcctccgcacgttcattcgaatgtgcagagccacatcagccctcctccagcattcgctcacagggccaccgccggccccaccgcgggcccagacctatgagcctggctccacgggttctcagaggcacacctgtgtgctgtccaacgcaagcacacacagtccccgtcacctctgctgcacctaaagatggaacccagggagagtctggattctcctgtgggaggctcccttccccttcctccctctcttcctctccccagggcctgccagttctcaccagctgggaggtggacaaggtgatatggggagagatggaagaggaccgggaggagaggtggagagcggacagaggggctggctgttgagatgggtggacaggaggaaggacatctgggaggaccaggtctctccgctcctcttggcctcatgtgtctccgtcatgtgtggatgaggacatcagacctccctacctttccaggttttgtggggatcactgagatgaggcacgggaagccatcttgaattccctccccatcagtttgtgttctccctccttttctctcccggtaccttcctccttcccctccccttcgccccccttactttccccaatctctaataggacttcagtcagagctgcattgacaggcagccctaggcagccagataaggaacctcggcaaaaggtttttgagcatgaatgagcttaaagcttggcactagagcccagtgctggctgggttcgggcacgtgctggctaggacaggaagccaggcctggagcaagccctggtcaatggctacctggcctcaggaggtgaaggaccttgtcccaggctgggcagaggtcaggagactcagccccgagctagctggggacaagggctgccactgcacttagcactttcaggctccaaggcccagggcaggtgctgaggtgcctgtcttggagccgccatgcagccccgtccccacagctgtctaacggcagggggcagggaagttacaatcctaatcattcacattttctgacttggaggccctctcctaggtatcagcacatttactcctaactacacacagggaggagggaattat

SEQ ID NO: 51 - DNA, 33162 bp, Homo sapiens
ttttacttggtatgcatgagtgtgtgagactgggagtagatgatgctttttagaaggaacgggaagactctatagaggagatggactttgaggtgagcctgaagacaaggaggataaattttgttttttgttttttccaaacacccttagtcagaggtccccagtacctgggccgtagactggtaccagtctgtggcctgttaggaaccaagccacgcagcaggaggtgagtggtgggcaagagagcattattgcctgagctccacctcctgtcagatcagcagtggcgttagattttacagaagcgtgaaccctattgtgaactgtacatgcgagggatctaggtgttgcactccttatgaaaatctaatgtctgatgatctgaggtggaacagtttcatcctgaaaccaacacggaaaaaattcgtcttccacgaaactggtccctgatgcccagaagattggggattactgccctaggtcaccacccctttccatactcaatatcaggaaccctgcttaaggtgatatgtacttatttatgttgtgttgaaagtaaactccaacatacaaaggaacaggagttttatcagctgtttgctgtgcattttcttgtcatggaaacctccaactgactaaaagatgtaggatgttaagaaaccaacctagaataaatagtttgtgatcagaaagatacggtggatattatttttacatgagtaatgagagtaatgtaaaattacttttacatgagtaatgagaagtctatattaagcattaacatagactaaacacatcttaaaattaccataatcttagcctatataatctcattttctccttgcaactagtacagagaaggaaactaaagcttataaagttaagtgattatttgaagtcacacagctaggaagtgatggagcaagtaccagaagccaagatttccaatctaatgcagagtccatgaatttcagttattattccatgccatgtcattgagaatattagtttatggaagcattcactggacatttagtctgagctctagaggagctaaaggaaaaagatatggttgctttggcataaatcaaaagggcagagtcaaaattgaagcatatttatgtttagtactctcaacatacttttatgttaccctgaatgacatatttttatgttaccctgaatgcaattccttcccataatgtcacatctaaccttttattttttatctttatctctgtatcttccttctcactagagctccaaccttctaataccaaggcactaggagggttttttctttttctttttttaaaatttaaatgttgactcaaagaaagagaggaggcaggtactcatacagcataaaatacaaaaattttggtggaagagtttcaccttcagtaagcaccccatcttttagtttactttaatttttctgctcacctggtggtcattctaccaaggcagcctcttaacatcatccactactccttagaatttgtagattctttgtctttctacccattaacaacaccaagccaagcagagaataactaacaactcatgttgaagtttgtggctaatagaatgcctatacttcagaaggaaaagaagagttaaggatcaaaagtctgtcggggtgggagacagcaagtaaggagcagagtctgagaggaacacaattctgtagcagaagaagtagctcacatgaggtctctcacaaaagctaaggataaagctgaggacatcccgaggatcaatgaaaaaaaagttaattttattagggatgttgctgtgaatcctgcaccattctttggactatgtatagattggaatatatcttttgaacctcaaggaaattgcacactagatacttttctgtgctccatgtgtatttgcccaacttgcatatttgtccatcatttcccagtccgattacttccagattcatagacttctccagaatggaaggtagaagaaaagaagagtaattgtagaataaaccagctacttgacaagtaatgtaagttactcatgccctgaccccattccttccaaaaacacatgtcatacacctctgggttacgcaagcatgtgctgtccacagtgatgtgttataaggtgacttgcaagtctagcctaggattgtgtcagataccagctcaaagtatttcatcacaggttgtcttctagaaaaagacagaataaattccttttagatttttccttctttttctcagtggaagttgctaaaaagaggagaaatgtgattgaccagtcatcaaaaaaaatggctgattacatataatctactaattcctgcattcatttaatgttaattgagcacttatcatgtactgataacaaacaaacactagctacaactctgaatgtaacagatccaatctgtcctcacttggatcttattagcctgtatatgaaataagacccaagtcaattgagactattaccaggagttatcttcacaatcactgatacaactaacatgcattaaacttctcctaggtattactgggcactgtgataggcatagggtgtacagagatgcactagatttggcttctgtcataagggggctaaaagcctagtgggaaagaaagataatccctcttgaacatgagagatggttgctgtgggaggactgaagaaaaggtgacaaatgcctacttggagacgttgggcatgtatcactaagatgcaaagtcttaacaatgtcctacaatgccctaagtaatctacctggcaacgtgtgcctctctacactggttggttctagcacttcctgtctctggatctttggactggcttatccttctaactcagggcttctcaaccttggcactactgatattttaggctgggggactgtcctggatctagcacatagtgagatgtttagcagcatccctggcctctactcagtggataccagcagcaacacctccaacccccaagttacgacaaacacaaatgtctcaagagagtgcaacatgccccctggggcaaaatcatttccagttgagaactactattctaactggggtgtttctctccaaagtatctgcatagccagggactccttccagaattggctcaaaatatcactttctcaaaaagacccacactgattgtcctatatttgatagcacaataggatgactaaagtcaataatagctcaattgtacatgttgaaataatttgagtgtaactagattgtttgtaactcagacaataggacttgaggggatagataccccattgttcatgatgtgtttatttcacattgaatgcctgtatcaaacatctcatataccccataagtatatacacctactatgaacccacataaataaagagataaataaataaatagagagaaaataaatacataaataaataaaactccaataccacacaccactcttcattcccctcactctcttaaatttttgtctatagatcctaacatcttcggacctactatataatgcacttatttataattattatcatctctctactaattagaatatacattcaacttgagtgagagggactgctttcttcactgttgtagtcttctgcccagaacagtgcctggcaaaatgttaaccatccatacatatttggtgtataaataaatgaatgaattatggtcaacatttgtgtaaagttgtaacatttacaaatacatccacacacaagatctcatttacccctcagataatattattaattaggccatagtgttatttttgttgtatggtttaaggaaactcaatgatgttaaaaattagtgacacccacaaaaaatgatgatgccagaaagtaaaaaggataatgaaatattttaaagtatagccttcagatttggtttggctgtgccccaacccaaatctcatcttgaattgtagttgccataatcgccacgtatatcgtgggagggacctggtgggaggtaattgaatcatgggggcagttacccccatgctgctgttctcattattgtgagtgagttctcatgagatctgatggttttataagtgccaggcatttcctctgcttgcacctctccttcctgctaccatgtgaagaaggacatgtctgcttccccttccaccatgattgtaagtttcctgaggcctccccagccttgcagaacagtgagtcaattaaacctcttttttgttgttgttgttgttttgttttgttttgtttttaaataaactaccaagtcttgggtatttcttcattgaggtgtgagaatgggctagtacaccttttctatattacaccatgctcttccacggtatgaatgaataagcttggattcactggccaaactgggagtcagaacaaagagggaaaaccctcttgcctgcaatgaaccatcctttgcctatttattcatgaataaatagacaaaaaggatttttctacctcaggaaaaaacatagtgtttactgcaacaagacttcctttcaaatccacttgctatgactctgtccttctctgttgcttgaactagggtacatgaatctcaatgtaatatagggatgtagaaaagtataagagaagccccagaataatcaatagacctctagtaagatagtcacattgctcaatatgcaaaggtgacaaatactctaagatactcactacatgttaaaaataaatacagatatattgttcagagatgtattcatcaactacttaactatgtatctacccatgcatttaataactgtgagcatcataccaggcctccattctcatggagtttgtattctactggtagaggcagataataaagagatgagaaattcaaagtaatttaaaaaataacacaggaaaggtcatagacattttggtctggggaggagatggcactatgtaggctgattacctgtgagggtgcactcactcacctcttgtacttgtgaagaacatactgaaatgtacagggtgtttgggaggaaaataatgagatgcacagggcagtacttaatgtgaagacctcaccatagagacaggaattaagtcacctggagccaagagaataccctttatgcctttgcttaaaagcaccattttctgtactatataccacaagagcattggtccatggcacattaatggattctggactggtaatgggtgtccaaggataaaagagggttgaatgggtcaaaaagttgggaaacattgagtactctatctcctttcatagatgcaaaataaacattagtctaatacatgttctaaggagtccttagaaaataaatctgtttttctctgtttaactatttgtttcttttacttacctgaacagagcttttttttcttcctagtaacaaactgttgttgtatataaggtaccactgattataaggtgtaccattactttatttgccactaagaaagaaaaaaaactctgccaattataattgtactatattgtcaattatatgagaaccattctgctttgagaggtgttgacatgaaaaaaacatgaaacttaaaaacttgagatggttggatggaatgaggtttggtttttagatatgtcaggttaatgggaccttttttaaaatcactatgcaatggaaattataggattctaaggttgtggcataaatacaacctgctgatcaacagaattttgtgttcctcttccacagtatagtattggtgctgtgaagtggtgctcaccattaagtgtgtgtgtgtgtttaagttttgggtagggggaagagccttgaagcttagaagatagagatcccttgcaacttggtattgtgttgggtctagttttggtcaaatgcaatgagagcagagataatgcatgtcacttctgagcagaggtagttaaatacatgatatcatcccctactttcttcacattctgcagtaaacttggaggctgcatgttgaatatgaaagtataatgaaataaaagaagcctagaaccaggaatcatacctggggtaatccaatcagaaatatcctcattgagtgtttcatgagccaggaaaacttttattaagtcacaataaaatctggaagtttatacagcaattagcttagtctaacacttgtcagttttgtgcatatttcttacagcatatgcattacctgccaaataaaagcaaacacttctaggtccctggcgaatatgggattcctccattgactgactgattatgggtcctgagttgaacttgctctgcatgaaggatgtaggcgatcaagtggcttgttttgcctctggccaaatctctaccactatgcttaagatgcgattaattatgtacaacaaacccccatgacacacgtttacctatgtaacaaacctgctcatcctgcacatgtacttctgaatgtaaaaataaaagtaaaaaaaaagaaaacaagaggtggttattattctactgtgggagaaattataggcccataatggtaactaatcaccacggtcttacctcattataatactgcatcggtaagttcatcaacataagcaagttagatctgataaccaaggggcttacagtttctaatttgtatttgacacatggtctgccttctggaagagcagcatagaacctagatgtctttgattaaggtcagtaaatgattgagtgttaatcccattcatttcccaggaaaaggaaacctctttacaagtcaccaccagggattctccaatcacacataggaaaaatttccaggaagacttctataaaacacatgtattaacatctccgaaaacatagttgaaaggacttccctgggcccttttccttagttcctcatctagactatcaagcggtttcctctccaaatgatgggaagaaagtgcatttgtctattacacacttgtattactctattcacttaagcactgtgtcccagtaatggggtctagttatgtctggcttgaaatgacccacatatttgtttctcattcttaggaagtggagtgtttctgtatgtgtatatgtgatgggggtaggccaggagattttttatctaggcaatacccagcctgaaatcattattagcatgacatgagttaaacgtatttctattttagaaagatgttttcaacagcaggatgaagaatcaattggaagagctggtacattgaaagaggtgaatctagactttgggaggcttcttaaagtatattgaactagtctaggccgtgggatatgttcaatagtaatggtagtagaaatggcgactgacattttggaattattttacagatacaatttctacaacttggtggaacattttttaaaatgtaggttttattattcggctatggtgaaaacaacagatcagaagatgatgccactggaaatatagtttgttgtttacagttcctaagaagcgggggcatgccacaccatgcagggccacattggtagcaccagagtccgtcaggaggcagagggagcaagaggaaattataggcacaagcttttattgttgttactgcagaaaaggcaaggcaaggcagggtaagcagggataggactggctagtttgaataacctcagtgggctctggggtagagggtctgtctctagttgtctggtacctggacctgtgatgattagggctgaataacagtgtctacttgggtgtaaaagccaggtagaggaggtggttcagaggaagggctctggattgcttagtgtgcataaggcatgctccagagcaaatcttttgctattttttagaactaactagccctggtaagtgcagtctcttcccagatgccagaacatcaagaacacagaaaagaagacaattgggttaatacatgtttagcatgagaaatgaggaagtaagggaaataaagtcaaagagatttccaccttggatgactatgtcaaagtgaaacaccattaactttccagggaactaaactttattgagcacctactctgtgtcaggcactgctctaaaatctttacatgaataatctcaatactcagagcaaagctttgacatggaggttgtttttatcttaactctactggtgtgttgatggagtctacaagagtttgtgcccagtccaccacaaaatggtccctcacagcttggtttttgacacgttggattggaagtgcttggaggatattacagtagaactatctaggacttagcatacataatattcctgttttaaatcaggttcttatttaacagaaacttacattgcacttgctactttccagacactgtcctaaaagctttacaaatgccagttcatttaatcccaatacaatactttgagatacatattatcatcttcattctatccacattttcaatcctcatcatagctctcatttatggaatgtaatgatgatgctctagactagacgttttacgtaagttagcttaattcagtaattcaaaacacatgcgattatcttcgttttaaagaccagaaaactaaaggttggtaggtttgtataatttgactaccattgcgtatctttattttaatacattttataaatgcaagcttctgctatgattaaaagtgattaccacattttacagaccagaaagtaataataagtgttggtgaagatgtgaaaaaatgagaactcctgtacaccatttgtgggaatgtaaaatggtacagatgctgtggagaatcatatggtgggtgctcaaaaaattaaaaatagatttaccacatgatccagcaatctcacttctgagtacgtatccaaaagaattgaaaacagagactttaagagatatttgtacaaccatgtttatggcagcattattcacaatagctaacgtgtggcaacaatgcaagtgtccatgaacagacaaatggataagcaaaatgtggtctatacatacaatggaatattgttcagctttaaaaaggaaggaggctttgatctatactacacagaaaagaaccttgaggacattatgcaaagtgaaataagccagtgacaaaaagatacatactgtatgattccacttctaagagctgcctagagtagtcaagattatagagacaaaagtagtgcatagattcaagggcctagggaaaggggaaatggggagttatttattaatgaatagtggtgatgattgtacaaaaatatgaacataattaatgccactaaattgtacacatacaaatggtcaagataataaattttatgttatgtcatgttatgttatgtgattttaccataatacagaaaatgaaaaaagaaaagaaagaaagtaaagcttagcggtttacatgacttgaccaatgcctcaaagccatgagtcacccagctgagatctgaacttcagtatattccattctgaaatcccagacttttcccaatcttcttgtacttttcaaactgtgtttcagttgaggtttattttcagttttgtatgtgagtttcttcacaagaaggggcgggccaaattgtgtcctgcaaaaacctacatatcgaagtcctaacccctctacctcagactatgactgtatatggagagagagccttgaaagaggtatgtaaggtagaatgaggtcattatggtgggccctaatccaacataactggtgtccttataagaaggggagattagaattcagacacacttgctgacaccttgagttcagactggaagcctctagaattgtgagaaaatgaatgtctgttgtttaagccacccagtctgtggtatttccttatggcagccccagcaaactaatacaaatagtgtttccacagctgaaacaaaattggaaaatcaccgtcatcctagagagttacaagggctattttaatagaacctgattgttttcctaaattcaccaagcccaggcagaggtcagatgactaattgggataaaagccaactagcttcctcttgctgtttctttagccactggtctgcaggcgttttcttcttctaacttcctctcctgtgacaaaagagataactattagagaaacaaaagtccagaatgctaaggttgccgctttcacttcctctcaccctttagcccagaactgctttgaatacaccaattgctgtggggcggctcgaggaagagaagacaccagtgcctcagaaactgctcggtcagacggtgatagcgagccacgcattcacagggccactgctgctcacagaagcagtgaggatgatgccaggatgatgtctgcctcgcgcctggctgggactctgatcccagccatggccttcctctcctgcgtgagaccagaaagctgggagccctgcgtggaggtatgtggctggagtcagctcctctgaactttccctcacttctgcccagaacttctcactgtgtgccctggtttgtttatttttgcaaaaaaaaaaagagttaaattaccttaaagactcaagaagccacagagatcaaataattcattgttacagggcactagaggcagccattgggggtttgttccatttggaaattttgagtgctaacaggggcatgagataacatagatctgcttaaggtccctgctctgctaccttgtggctctgtgaagaaattatcaaacctgtctgagactagttttcgcatctgtaagagaattataataccttcttcactagagagtaagcagactgcttcagtgtcatttcttcccactggtggtctttacactcagcttcaagcagtcaccctgctcctttcaatctcaggaaaaagatggcttttgtgtgtgtgtctctagagaaagaactttctaagtgggtgtcagacttctgtatgcagtaatatagtttagtccagaggatgaaaaaaataagagaatgaaaaaggaaaagagagagagagagaagaaaaaagcaagagggaaatatgtataatgtcagctaatgcaacagtttctttcttagtgaaataccaatcagctggttggtaatcttattcatgatggatctcttttgtttttcccctgcgcagacttcacagttgctttagaaacccatagtagagccgaacagctaagaaaatgatttacagtgaggcagggtcagaaactcaagagagaaaaagccagctgcagtcctgaagttgaggatataggagaaaatcaagtaatatttagcaaagactaattcattatcttgaagccatcccttccctcaattccctgcccatagtcctcctccttgtcctcttctctgtatccctctgctgttaggttaatggagatagattttctaattaggctcactgcgagataaaaccacagccaaacttgacttcttttccccatgtaccttttcctgtcagtccctgaagcctgtccatccctgcccatccccttagttccactgtaaggcaggccctcatttcccctggcattgactcttacacactaactgctttcctgattccagtcttcttcctttaactcattctgcacgttcttgtttgttatgtacttgcatttgttgttattatttttccttaggcttcaatctaacaaattactctccttaaaaacttttaataactctccattgccattagaacagctttctaccacagggcctttgcactggctatttcttctacctagaatgctagatcagtgctatccattggcaatattatgtgagccacatatgtacttttaaagtttttagtagcctcattaaaaaaagaaacaagtgaatttaatttcgataatagttttatttaacttagcgtatttaaaataatgtttaaaattttaatatatatttacctattattgatatttttacattccttgtttggtactaagtctggaatttagtatatattttacatttaccacacttctcaatttacactattcacatttcttgtgtttgataactgtgtatggctagtgactaccgtattggtcagtgcagcccaagtccttttcatgctttaatcactccattcagatctctgattaaatgtcccctcctcagggcagtcttccttgattgccccatgtagagctctccagcctcacttatttgcctcaaatccccttatactgcttaatatttttttttctagagcacaacattttatatttttgtttgtttattttctctctctccctttgtaatggaatcggtaaggaggcaggatcattgctggttttatttaccactatatttccagtggccagcacacagtagccgctagatgtgtaagtgataaatgattgaaataattgctgcaggacaaagtctgaggccctcctgatctggcttgccctcttacttagatttcaccactcccaccactcaccagctaatctgagtttgttttccactctttacgtgctcacgttgtcctctccttaggacatgtttttcttcccctttccacatatctaaaccttactcatcttccaagacccactttaaaatcttccttttctgggaagcctttcctgaatccagacttgatctctgctttctctgaaccacagggcatattttctaagcctattttatggccccttgagatagtgttagctttgctcctatctaaactcttactctagactgtgagtccattgaagtctggagctgcatcatatttttctttgtaatgcccacagcacttggcaggaaatgcctacaatttggacttaagtaaaccttcatttaatcagttattcaatcagttagtgattcagcaaatatttattgagcaccaaccatttgccagacaccattctgagtgctggagacaaagcagtgggcaaacccatcaaacttgcaatggaatacaggagatgaacaatacgatgagaacaatcagatagacaacataatgttagatggttgtgcttcctgtgaaagggaataaaagagggcaaagaaagagtgcctggcactgtttctattagacaatattgtctttgaggctccatggcttgcaacatttaagcagacatacgaatgaagatctgcatgtttgaactctgactttgcgcatattacttcatttctttgaatttccattttcctcatctttaaatgcttatttgaagattaagtgaaagtatataacaaacaagaactatgcaggcgtatggtaagggattaatgatagatgataataattaatgttgacatctattgatcacttatactgtagcgggcttttaaataaactctttaaacaccttatctcatttaatccttcaaacattctattggtttcaaacaacagaaaactacaattagctggcttctgcaaggaattttgttggaggaaatgagagcattcagaaattagatgggagcgttagagaattaggcttacaaagaatgtgggaaagtaggctagaaagcagtgtaaaaacaaagacagcataaagcacttgaccttatttactaggttccaccatgggaatccatgcactctaaagatttccccctatttctacatcactttgctcaagggtcaatgagccaaggaaaagaatgcagttgtcaaaatctgggccatgactaaggaaggtctggacatcttgactgccagacagtctccccaatgatatggagtatttagaatgatactggatattttatttattttttgtattttcaacttttaagttcagaggcacatgtgcagagcatgcaggtttattacataagtaaatgtgtgccatggtgatttgctgcatagatcatgaaaatatggaacgcatcatggatttgtgtgtcatccttgtgcaggggccatgctcatcttctctgtatccttccaattttagtatatgtgctactgcagcaagcacgatattggatattttattacctacattttacatatgataaaatgaggctcactgaggtttttcttttgttcgttttattttgttttgtttttaaagacttggccctaaaccacacagaagagctggcatgaaacccagagctttcagactccggagcctcagcccttcaccccgattccattgcttcttgctaaatgctgccgttttatcacggaggttagaatgctgagcacgtagtaggtgctctttactttctaatctagagtaagacaatttataagcatgaattgagtgaatggatggatggatatatggatggaaggatggacagatggatgaaaggttgactgaattttgtgcttgcacaaaaagaggcccctctccaccatctctggtctaggagaggggagttgggagaccatgcagtaaagatacttcatgtcatgtgtaatcattgcaggtggttcctaatattacttatcaatgcatggagctgaatttctacaaaatccccgacaacctccccttctcaaccaagaacctggacctgagctttaatcccctgaggcatttaggcagctatagcttcttcagtttcccagaactgcaggtgctggatttatccaggtaatgaatccacttttacatactgcacaaggtgaggtgttcattgtcctatcatttcattattggactggaaagcttggtttgtggagtctcatcttcattcacttattcattcatacaacagatgtcttattaactatataaccttgagcaagctacctctattctccaggtctcagttttctaatctgtgaagtaggcagttggctgagacagcttctaagggcaattctaattttaggttttcttttaagacaggagagaaaattagcttaaattctttcataagcagctatttattgactacttgctatatgttgtacactctgcaagaagacaggcatatattgatatataacacacagcccctgttgttaaggaggcatatcttcttgaaagagttaataccttaaagtcctgggtatggtcctgggtacatagtatatagtcaacacattttaattatgattttttggatctggaaactgatataaagatagcgacatataacagtaggtgataaattatgtttaaactaaaggtaactaattgtatttttcagaagaggggccttctctgtggtgggtagtcaagaaagatttcatgaactgcataagattcaaacaatgtctagaatattaaaactagtgtacaggatagggaattaggaaaagacaagtaacccaaggagaaagatgtcaagattaaaggaaaacatctgctgtgggcagggaataatggctaagattttcttttctgatgcagggaagtatatcgtttgttgtggcaggtgaaatgtcatcttgatattttaggggaaccaaattctaaaagggttttcatcatcggggccttatttgcaaatcgaactagataatggatcatgttctctgcaatggtttgtaaaacatttcaaaacattttacatattttttattatagaaattattgataaagactaaggtcacagtataaaaatcctttttagagcagacatttctgtagaagagtgaacatatgacctattatactctaatttggatatagataggatgtaacaaaggagtaatggaacaattcaaaggcagtggtatagtgcatagagtcctgttggggtcagaagacctgagccaagtttacccccaacatttataaccatgtaaccttaggcatattacttcatctcccttaatcttagttttcatatctgatcaatggaaatgatgaaacttattctgctggattaaatgtgataataaatattaatatgctgtatatatttaaatttttataaaatatattttataagcataaagtattcttacagaatttcattaggtttttaaaataatttcaacttttatttttgattcagggatttacatggttatattgcgtaatgctgaggtgtagggtacaatcgataccatcactcaggtagtgagcatagtacccaatagttagtttttcaacccttgctgctttctctctatcccctctctagtaatccccagggtctatttttgtcatctttatgtccatgtgtactccatgtttggatcctacttataaagtgagaactcatggtatttggctttctgttcctttgttaatttgcttaggataatggctactagctgcatctatgccattatgttctaaatttcagtttcctgcatgaaaattttgtcaagtactctattaaggtagaccacctctccctttttttttttttcaaacaagaagtagtttttcaccaaacaatgtctcttatgtaattcatcttcaatccactggatacccaataaacttgccccagaaaccttaaatctgtgcttacagagaggccagcttcccttcttgttaacccataggagattctgaattagggcaagcacaaaagatagcacaatagacatcctttgccttttcgtacagtgttcacatacagtaactcaactagtcttgtaagaatgctttgtgatagaccaggcagccttctttcccctatagaaatatatatatatttctttttataggtgaggaaactgaagcttgaataatttaaatgacttatatacattatcattgcttgttagccacagaccagagatttaagttcacatctccagaatccaacttaaatgttttctttgtcttaatactctacttctctaaagtgattatcaccaatgtaatgatatagagacacagcaagaccctttccttctcacctaatgtatagagcaatgcagagatagaatgatgggctataacaatcatataattgaaagaaagaacttcaaaaataatcaagttcagctgtttgatttataaatgtgataactaaaacctagagaggaaaagaggtactcaagatcacacagtaggagaggactgcagaaacaccaaacccaagctcttttgtccactcttccagcgttctttctactatactgcctatcctttatctagttaccaataaataacaaaagcttggaccacaatgcttttattgtctaggaaactcctgaagaagctaaataaaatgggtggggaatattgtaaatgtaattcaggctggattaagaaagaacttatttgtacattgtaactgacaagcacctgcaatgctgaaaggaatttttcattggcttgctgtttgctggctgcatcaaagccctgtctctaggacatgtctctgaacattgtgtgtagcatggctttcatttcttttaggataaaattcaaaaccctttatctggttggtaaacctctgcctaattgggaaccttctttctccacaactccatattgtacactccaatttcatctctgttctccaaccatggaagctatttgtcatgattcctccttgtgtcattttttttctgtcaaccttggggcttttgtgtttgctgttcacttcacctccttttattgttaacttctactcatctttcaattttcaacttaagtgttctcagagaaacctactttgattttcttggtccacaacggttctctggatgtgaactcttatagcacataattttcacttttttccacaaaactcgctcctatcacctgttacaagcatttacctctgataacaagaactttcaaatatctagctgtcatgtaagcacttttcataaacattaagagtatctgtgacacttatgtgtaatgtttcgtatctctgaaattgatatttaccagtcatttatcttggctaccaactaacaactatccatattatctgtaccaatcagatgtataatcacaattttgtgtgacagaaaatggctaaacttgatccaaggctattacatgctttatcaactgcacaatctttatatatgtcaattattgatctttaactgatttccttcttatggattttctcctctgcttatcatgtatgcctaacatgacaaaaaagagcctatcattgcagccagtatgataatactcagtctgtggggcttcttatttgcttattccatcatcatctgtcctgcttgatgtctttgcctatgcacaatcatatgacccatcacatctgtatgaagagctggatgactaggattaatattctattttaggttcttattcagcagaaatattagataatcaatgtctttttattcctgtaggtgtgaaatccagacaattgaagatggggcatatcagagcctaagccacctctctaccttaatattgacaggaaaccccatccagagtttagccctgggagccttttctggactatcaagtttacagaagctggtggctgtggagacaaatctagcatctctagagaacttccccattggacatctcaaaactttgaaagaacttaatgtggctcacaatcttatccaatctttcaaattacctgagtatttttctaatctgaccaatctagagcacttggacctttccagcaacaagattcaaagtatttattgcacagacttgcgggttctacatcaaatgcccctactcaatctctctttagacctgtccctgaaccctatgaactttatccaaccaggtgcatttaaagaaattaggcttcataagctgactttaagaaataattttgatagtttaaatgtaatgaaaacttgtattcaaggtctggctggtttagaagtccatcgtttggttctgggagaatttagaaatgaaggaaacttggaaaagtttgacaaatctgctctagagggcctgtgcaatttgaccattgaagaattccgattagcatacttagactactacctcgatgatattattgacttatttaattgtttgacaaatgtttcttcattttccctggtgagtgtgactattgaaagggtaaaagacttttcttataatttcggatggcaacatttagaattagttaactgtaaatttggacagtttcccacattgaaactcaaatctctcaaaaggcttactttcacttccaacaaaggtgggaatgctttttcagaagttgatctaccaagccttgagtttctagatctcagtagaaatggcttgagtttcaaaggttgctgttctcaaagtgattttgggacaaccagcctaaagtatttagatctgagcttcaatggtgttattaccatgagttcaaacttcttgggcttagaacaactagaacatctggatttccagcattccaatttgaaacaaatgagtgagttttcagtattcctatcactcagaaacctcatttaccttgacatttctcatactcacaccagagttgctttcaatggcatcttcaatggcttgtccagtctcgaagtcttgaaaatggctggcaattctttccaggaaaacttccttccagatatcttcacagagctgagaaacttgaccttcctggacctctctcagtgtcaactggagcagttgtctccaacagcatttaactcactctccagtcttcaggtactaaatatgagccacaacaacttcttttcattggatacgtttccttataagtgtctgaactccctccaggttcttgattacagtctcaatcacataatgacttccaaaaaacaggaactacagcattttccaagtagtctagctttcttaaatcttactcagaatgactttgcttgtacttgtgaacaccagagtttcctgcaatggatcaaggaccagaggcagctcttggtggaagttgaacgaatggaatgtgcaacaccttcagataagcagggcatgcctgtgctgagtttgaatatcacctgtcagatgaataagaccatcattggtgtgtcggtcctcagtgtgcttgtagtatctgttgtagcagttctggtctataagttctattttcacctgatgcttcttgctggctgcataaagtatggtagaggtgaaaacatctatgatgcctttgttatctactcaagccaggatgaggactgggtaaggaatgagctagtaaagaatttagaagaaggggtgcctccatttcagctctgccttcactacagagactttattcccggtgtggccattgctgccaacatcatccatgaaggtttccataaaagccgaaaggtgattgttgtggtgtcccagcacttcatccagagccgctggtgtatctttgaatatgagattgctcagacctggcagtttctgagcagtcgtgctggtatcatcttcattgtcctgcagaaggtggagaagaccctgctcaggcagcaggtggagctgtaccgccttctcagcaggaacacttacctggagtgggaggacagtgtcctggggcggcacatcttctggagacgactcagaaaagccctgctggatggtaaatcatggaatccagaaggaacagtgggtacaggatgcaattggcaggaagcaacatctatctgaagaggaaaaataaaaacctcctgaggcatttcttgcccagctgggtccaacacttgttcagttaataagtattaaatgctgccacatgtcaggccttatgctaagggtgagtaattccatggtgcactagatatgcagggctgctaatctcaaggagcttccagtgcagagggaataaatgctagactaaaatacagagtcttccaggtgggcatttcaaccaactcagtcaaggaacccatgacaaagaaagtcatttcaactcttacctcatcaagttgaataaagacagagaaaacagaaagagacattgttcttttcctgagtcttttgaatggaaattgtattatgttatagccatcataaaaccattttggtagttttgactgaactgggtgttcactttttcctttttgattgaatacaatttaaattctacttgatgactgcagtcgtcaaggggctcctgatgcaagatgccccttccattttaagtctgtctccttacagaggttaaagtctagtggctaattcctaaggaaacctgattaacacatgctcacaaccatcctggtcattctcgagcatgttctattttttaactaatcacccctgatatatttttatttttatatatccagttttcatttttttacgtcttgcctataagctaatatcataaataaggttgtttaagacgtgcttcaaatatccatattaaccactatttttcaaggaagtatggaaaagtacactctgtcactttgtcactcgatgtcattccaaagttattgcctactaagtaatgactgtcatgaaagcagcattgaaataatttgtttaaagggggcactcttttaaacgggaagaaaatttccgcttcctggtcttatcatggacaatttgggctagaggcaggaaggaagtgggatgacctcaggaggtcaccttttcttgattccagaaacatatgggctgataaacccggggtgacctcatgaaatgagttgcagcagaagtttatttttttcagaacaagtgatgtttgatggacctctgaatctctttagggagacacagatggctgggatccctcccctgtacccttctcactgccaggagaactacgtgtgaaggtattcaaggcagggagtatacattgctgtttcctgttgggcaatgctccttgaccacattttgggaagagtggatgttatcattgagaaaacaatgtgtctggaattaatggggttcttataaagaaggttcccagaaaagaatgttcatccagcctcctcagaaacagaacattcaagaaaaggacaatcaggatgtcatcagggaaatgaaaataaaaaccacaatgagatatcaccttataccaggtagaatggctactataaaaaaatgaagtgtcatcaaggatatagagaaattggaacccttcttcactgctggagggaatggaaaatggtgtagccgttatgaaaaacagtacggaggtttctcaaaaattaaaaatagaactgctatatgatccagcaatctcacttctgtatatatacccaaaataattgaaatcagaatttcaagaaaatatttacactcccatgttcattgtggcactcttcacaatcactgtttccaaagttatggaaacaacccaaatttccattgaaaaataaatggacaaagaaaatgtgcatatacgtacaatgggatattattcagcctaaaaaaagggggaatcctgttatttatgacaacatgaataaacccggaggccattatgctatgtaaaatgagcaagtaacagaaagacaaatactgcctgatttcatttatatgaggttctaaaatagtcaaactcatagaagcagagaatagaacagtggttcctagggaaaaggaggaagggagaaatgaggaaatagggagttgtctaattggtataaaattatagtatgcaagatgaattagctctaaagatcagctgtatagcagagttcgtataatgaacaatactgtattatgcacttaacattttgttaagagggtacctctcatgttaagtgttcttaccatatacatatacacaaggaagcttttggaggtgatggatatatttattaccttgattgtggtgatggtttgacaggtatgtgactatgtctaaactcatcaaattgtatacattaaatatatgcagttttataatatcaattatgtctgaatgaagctataaaaaagaaaagacaacaaaattcagttgtcaaaactggaaatatgaccacagtcagaagtgtttgttactgagtgtttcagagtgtgtttggtttgagcaggtctagggtgattgaacatccctgggtgtgtttccatgtctcatgtactagtgaaagtagatgtgtgcatttgtgcacatatccctatgtatccctatcagggctgtgtgtatttgaaagtgtgtgtgtccgcatgatcatatctgtatagaagagagtgtgattatatttcttgaagaatacatccatttgaaatggatgtctatggctgtttgagatgagttctctactcttgtgcttgtacagtagtctccccttatcccttatgcttggtggatacgttcttagaccccaagtggatctctgagaccgcagatggtaccaaacctcatatatgcaatattttttcctatacataaatacctaagataaagttcatcttctgaattaggcacagtaagagattaacaataactaacaataaaattgaatagttataataatatattgtaataaaagttatgtgaatgtgatctctttctttctctctctcaaaatatcttactgtactgtactcacctattttcagaccataactgaccatgaaacctgggaaagtgaaactgtggataagtgaggaactaacatacatacatgattgtttatctacagatgtatgcctcagtttcttagtatgcttgaaaatgtatgattttgtgtatatccgtgctacatgtaagtgtggttctattcatatttgaatatgaattctgcataagtgtgtttattcaagcaaatgtacaaggctctgagaaggaagatcaacatacaacttggaatatttcaaggccgaaatattcaaggctgacattggcctccttcctatcagttccctctcccagatggaaattctagaaatggcaggtgaggtggacaagcagggaaagaaattatatgcatagaacagaaggagaagaaagagtaaagtcaggcctcagccagcctctttttagctctttaaatcctctggatttaagagggataaagggtggaataaggataaattaatgccaattgtaatgccttaaatttgtgtgataccttacaacttgaaacatattcacaaaactatatatttgaatatctcattagctgagtaaggtagcaaatcataattaactttttccattttattgatgggaaagctgaagttcaatgaagtaaatttttcaatagcccacagagtaggaaagtgacaaaacctgagcctgggcctccaggtcactcaaggacactttctttcttccacacccaattgcttcatgcttaaagttggcaaaacaggaagtgaaactcctgcagttttctgtgtggttgacactagcaagggtttctcagttgaagccatgaatcattaagccaatacatatgcatatatgttatacataccaaatgatttatttataaccctatctttccataaaggacttgaaggagcttcaaacaaaggatatgtgaacaatagggttaatcaataataagtagaaaatctggacatagaataaaaagaggagagaaagacaccgagaatgagcgttaatacagtgctttccatttttctggtgttttgagtagcgtggcttttggagaaagccaaaactcaaattcactccttatcaactgtgtgccttgggctccatttctctgagagtctacttagctccaatgtaaaataagaatagaactatgactttgtaaggttgctctaaggattgaaaatcatgtattatgttcaatacggggacactgtccttatgggtgagtactcccctaagactttattaagagggcactaggagaagcactgggaggtcttctcagtaacaacactaaagtaattgctatttttccagcctgtggaaccacagaagtgactgtaactaaaattagacatttctttctgattcattctctactcacgggattgtcagaccccagtcttcttctggactctataaactttttagaaatcatcagcaggctcctggagaagcttaaatgaactcacacaatatgtgacagtgaactccctgggagagtgaaaaccaaagtctaagccagtgtctccatttacttgtgtgattgtgggcaagtcattcaagtgctttgaggctcaggtcttaattcatgaaatggaggtaataataccttgttggcagacctcacttggttaaaatgataatgttgatagttacaatagttacatttaattgatcaattgttttatgcaagggctttatttgtgctatctcagtttgtcacatcaatgaattagaaagatacgaaagtatttccaatttacaaatgaggagtctgagtctgggagtcattctgtcatgtgtccactgtcacctgctcattggtggcagcactgagattaggatctaagtccacttcaccgcagaagcagggcttctaaatactgttctatggcaagagcaccctgctctcacaaaatgcataaaacttcctatctcaccattataattttgactgatattaaacaaagagaagtattattattattacttgtttttatttatattacagctgtaagagccaggaaaaatgtgatctaagttatgtgatcaaagattttttaacagtgaacaaatcaggcccactagatgatggcctttctttgaacaacatgcctagggttgctctatcatgtctacagttggtctgacttcctgacgggcatcacagacttgtgattaaacacagaggttatgggggaagttccaaaagcttaggactttccagatggttggaataagatcacacactctggctgcccttatggagatcaccgaacttttcaactcaaagtaaaatctgtggagtaaatggtcgatcaaaaggaaccaactatattgagcaccatgcgtgatcatctgatcgttactgctaccttgtgagttaaaggctactcttctcattttagaaatgagaaaagagatgcccagagaggacgagtaacttgccttaggtcacacagcttatattaatcacaataacatttgccgcaccttctgtattttttttaagttgctaagcttttggtgcatgtctggcaccgttttagttgtatattatttcatttaattgttaaaatgaccttctgatgcaggtatttgtagctttgccattccacagatgaagaaacagatgaaaggactgaattgttcaataggaaggagcagaatcaggatatgaacttgggttggcctgattcttggggctgcattctttccataacataattgcttgctgtgatgtcctgggctactctgccaggggtggttagtggagtgaatggagaataatttagacaaggtcagtaactcccatgccatctagaaattaaaagtttaaaaggcagagtctgcaactctccttgatttctacagaaataaagatgatccctcctgtgacagtgctaagtgacaattctgagtgtaaatgcgctttttggcacaaattgtcctgtcctaatagtcttgattataattataaaataatgggtttctgaaaggctgcaagcagttctgggaatggcaataaaggtttagaaatgacgtgatgtttatgagagaagtgttttgttgaaaattaaactcacgtttaggagaaaggattgtgttgtatgctcctaggaaactatctcactatgtaattaaatcaaaaccagccagttaccaatttgagctcttgactcatactaacaacaccccatttcccatgggccaagcaaggcaggactgacctgaaataacccagcctgactctatccacagccaccccaggaccttgcccctccgtcttcctagggctcggccgtgagatgctagtgcatgacccttcctcttcctgggactgtccttgtctttccctttggactctgggaggtctgttctcctcctcagaaaggaataaacactctttctatttgtgggattccctaggagacactatataaaaatatagagttaaaaaaactatttaaaaaaaagacaacttcatgtctctactctgacttcattctttttaagatgggtaacaaagactctcttcaaggttagaaaattttattttaatttttatagatttagagagtgcaaatgcagttttgttacatgaatatattgcataatggtttagtctgggctgttagcgtaaccatcaactgaacagtgtactttgtacctattaggtactttctcatcccttaaccccttcccacctttctgagtcctcaatgtctgttatttcattctccatgtccatgtctacaaattatttagtttccactcataagtgagagcatggatggaactggagaagagtattttctatcccaagatcggttccttgatcttgtgtctccaaatcacttgctctctctcttacatcttttctatcttcttctagcctctttttgcaaacttcattttgacaaagaattccaggcagtctacagctgattttatttcaatacaacgattaaaatggaaaccatatatgaagatgacaaagttgagcaggtcccaaactctcacttttaaacaaatgcttggcttaagaatcacttaatgactttcattctgctatctatgtgtctgtgtatctaggtactaattatctatctttatgatctttattgctagaaattctggttcaatatcagaggttagtcctaaggaatttatattttaaaatattctcccagttttcgtgcacagacagatttgggaattactgttataatggaaaatggagaataaccacccacatttaatatggttattggttttgttcttgagatttattgctaagattcatgatagcccaggcaaggtcagataatgtatttttattttacactgtatagttgattcttctcaatcccactagatcagactctttgggatactaggattggcctatttgatggtgagctcactacatccatttagatgttgtgtccatgcaatcattttagttctcctagtttctacctatcacgttgtcattttcccttctttatcatcctgggtagctgagaccccacataaatatataccagaaaaatgttgtggtcttttctaaactctctgaggcatctgttgtcaatgtgatgttgttttttgtttccagtccaaaatatatcaaagtaaaatttaactccacttttgctaagtattcatcttgccttgagtactaagattccaaaaatgactttcccctctgaaaaacacaggatttccttgcgaaaacttgctgggccactgccaatcttcccagaaactcctttttccttatcgttgaggggaattggggaagtgatcactgacggttgaaattcagtagttttggtctttaagctgagaccctgagtcttctgaggagtctactgctccccagtgggaaacacctgctgtcaaaattttcctgcttgcaaagagcacttttgaaattaatggcaggggatgaatatctggctagtgctgtgctcagctgagttattaatagggccttctgagtcctctctacacatcatctttggctgaattagctgtggtttcagcacctgagagtctagcaccactaaaggcagggaatacctttgccagtttctggcatattaacagctgagatcagataagtgaacagcgatagaggtagtgaggtttaggattcaggtctgccaccgggagcgcacctctgggctcaggtctctcatttgtaaaatgggacatttaggtcagatcagcattttcaaaagtgtgacatgttagtaaataagatgattttatgtggttgacagatgaatgtattacctttagtggttatatgtttattttcatggttacttttatttataataaattttgtgactagctaagaatcaattatctctttaaaatatatttaagtttaaaatgtgggccaacttaggaaaaaaacgggatgaaatgaattatataaaaggtatgcagatttggaaaaattttgaaggtgtcacaagaaagattggcagtcagaaaggaatgaaccaaacggctgctgagggtcaggccagctctctgacattctagcatgttcacatctccagggctgtttccttacctataaattgtggcaattggagtaaatgtccattccaggaattctattctatgattagaggtgtaacttcatcatccagattttccagcatccttaacatgtggttttagcgttctaaacctgatgatgctatatcaaaacgggagactcattcgtcaagtcatgatgtatccatgtatttataatatttcccatgttccctcatttctgaaaaggattaagctatcaaccccattgagttataggtgaaaggctgtggaaacaagacattgatagtgaaatggctccaccactaacaggctgttgaacaaaggcaaatctcttgatctctttgctctttggtctctgtttatctatgagataacgttatttttacgctgtcttctgtgaaagttttgagaatgaaatgagacagagcctccaataaaatttagggaagtgctacataaatgcaaggagttattatgataacagattgaaaactcctccaaggaggagtttctcttttgccccatgttataaactcaagaatatcttccattttgcctacatattccaaaagcttttaaattaagctatatgtcattcttacaggagtctcctctatttcagcaatgtgtatacttggtcagttttaattatcttaaaggagaagaatacagtttctctaaactcaagcacttttgtggactaatccttgcaattattctttcttctttcccatacttgacatttaaagtgatatctcccaggctcctacactgttagtcacagaggtaccattcgaccccttgtgcctcttaccatatgtgaatgcttgtcagttgagagtaaactttcttcataaatttcacagttgtggattgataaaaacagagaactctggttcctcattccttcctgctttctttcttgaaatgccattcatgatggtcccttatatcactatagggctgctatcatccttcatccttatgccactgcaaatagcaaccaacagtgtccttagtgccagcactcccaggcatgcccctttccaagcagcagggtcaagccgctcccttcctgagctgtggcatctgtctctaaatcatgcttcctccttgcctgctgcaggcccttgtctctgccctttactttttctggctcttgccacggttttgaataaaactcttccaaatatctgaagctcaattctgttgccattctaagctctctaaatgtcaccacaatcttccttcctttgcattttcttattgtgcactaagttagttcttgcttagtaagtcttgtctttctctctgctttgacctgtcagtattccaacttccttattttttgatgttcattttctccttgctctctttcttcctttcttgtctgtgaactccattaaccgcttctgcatgtgaccattaatgtgcctgtctttcttctcatgtattagagagaacaaaagctttgggaatcagacagatctgtgttctgatcctgtcttatggtatctgtcttgtttgtctcggcttaaaatggggataatatctacctctcagttttgttggcagttcagtacacggaaataaagttctcactttcttttttctccttgagagtgttctttattttactcatctggccatctaatatttatgaagaagctactctgtggttgaaaaggcacatgaagctgcagaagtaaatgaccaagaagtgccctcaaagttacggagttcagattcattttggcaagagaggcatgtcaatacacacacacacacacacacacacacacacacacacacacacacacaatgttatgccaaaatgcagggtggtggggagtggagggttgttcttcctagaagcaatcagagaaggctttacagaggagggcccatttgagctggaaattgtaaaagaacagctctgcagatggatctttaaattcttaacctaaaagaagagcaaaaatgtaaatgataaatctgggaagtaataagtagaagaccatgtatagcagagttgaggaaagaaacaatatagtataaatactgaattacatgaaagctaatagttaattggcatcagttgaccctgacaaagacatttatctggactatgtctcaatttgcttatctgtcagttaaggatgatatattaaatgagtgcttatacaaacaaagtgcttaaaacagtgcaaggcacttcacagtcatcaaaaatgctaattttttgtgtgctttcattatgaaatggggagcatacagcccgacagaagcctaggtaatgtctcagcattaagcccactggtttgtggtgccttgcatttaggaggcccaagtccttatcctggtgttgatacaaacttcctgtgtgacactgggaagctataactcagtcttgacataatacaacttgttcttcggcttcaaaaactttcccagaattggagtgaccctaccctccctttcaagaaacagacaaacatcctagaatgttacaacataagggttgaagaagctgttgttaagtgatcatcttgttaccacaaaattgttaaactgcataacagagttatgcaatttcttcttcccctattttttattttatttttccataaggtattggtatttcattacatgagtaagttctttagtggtgacttgtgaaattttggtgcacccgtcacccaagcaatatacactgcaccatatttgtagtctgttatccctctccctcttgccactcacagcatttggggtgtcttctgggtcctgcaggagcagtccacttccttgagaggttttgtgggtcctcttgggaatgttggtttgttcttgcagtcaatttggagctaaaattcacaatgcaagcctctggatgctgctctgtctggagctgcaatctagtcctgactcctctctgccatgatcccctccatacaccttcttctcttatttttatgccaatgagtgaaggcctcaacctggccttccctgcctcttagttagcctcctgttctgcctgatgtcacaaggatagtgagaggcatggtctggatttgaaccagatctacctgttcccactgcaccatgctgactttgtatgaagaagccaccaggctagtggtggtggtggtggtagtagcagtagtgaaattctattgataatactacctctaccaataataataaaaaaggggagagatggaggaaaaggggtggagaatcaagtgaggaatcaactggagcagttctacttgattctgttttatgttttgggtttcttgttgacggtttagcttttgtgatcttaatttttgttcttttttgtttgtttttgtcatttccaaaacttctgctcagctttctatccactatagggattctttctactaccacaaaacaataacaataaagatcataataatgaaaaaatacaacattcttaagtccatttataccaagtgaaacagtcttttagcagttttcacgaaccaggcactacgttaggtgttttacgtgcatgatcccatttaatattcccaaccactctgtgaggcaggtgtcttcatcgccatttggcagaggaggaaactgaggctaagggagtttgaaccgatccatccaaacaacttagctagtaaattacagatagtaagatggaagattagaacccatatgtgcctaattccaaaagctgagctcttcaatcctaccctgaaatatctcctaagtatgattgttcagattatgctaaaaaatccagtgacagagctgattatttcctcaaatgtctcatttattgtttggcagctctgatgacagatataaagatggagatacataaactgactacatcagtccgcctatgcatgagagttggcccattattttcacctgtgatatggaataagaaccaagagtttttttttacatgcatttggatatgatataaaggcttgctattggagttggatcctgcccttttctcaccaggagattctggctggcttggagcagaaagcctttgttctggggtagcaacaccaatattctgcctaggagaagcctcctgcagagtctttctctttttttcagctttgtttgaccctcagtaaggtgctacttgagctttctgggaggtagaaaatgttaaatggatgtacacagatatcccctcctttgtaagttccatgggaaatgttttaaaatgggttcattgctgtctcccagtacactggggtagtggaatacaatgtgtttttacgaaatgg

SEQ ID NO: 52 - DNA, 24535 bp, Homo sapiens
cagttcagaatgcagttgctatcacaggcatgtatgaactggtacaccagtccaaaagcaggccaggtgtggaggctcatgtctgtagtctcagctattcaggaaactgaggtaggaggattgcttgagcccagaggttcgggacaagcctgggcaaacggcaaaaacccacctctataaaaaatacaaaggccaggcatggtggcccacactttgggaggccaaggcgggcggatcatgaggtcaggaaatggagaccatcctggctaacacggcgaaaacccgtctctactaaaaatacaaaatattagctgggcgtggtggtgggcacctgtagtcccagctactcgggaggctgacgcaggagaatggcgtgaacccaggaggcggagcttgcagtgagccgagatcgcgccactgcactccagcctgggtgacagagcgagactctgtttcaaaaaaaaaaaaaaaaatacaaaaatacaaaaattggccaggcatggtggcttaagcctgtaatctcagaactttgggaggctgaggcgggtggatcacctgaggtcaggagttcgagaccagcctagccgacatggcgaaaccccgtctctactcagaatacaaaaatcaggtaggtgtgatggcaggcacctgtaatcccagctacttgggaggctgaggcaggagaatcacttgaacctgggagttggaggttgcagtgagcaaaggttgtgccactgcaccctagcctgggcaacaagagcgaaactccttctcaaaaaaaaaaaaaattagccaggtgtggtggcatgcacctgtgattccagctacttgggaggctgaggtgggaggatcctttgagcccaagagatagaggctgcagtgagccgagatcatgccactgccctccagcctgggtgatagagcaagaccctgtctcaaaaacaaaaaaaaaagcaagggtgaggacagtgtcctggggagttctctgtaaccctggctgcatgagagtgtttgaacagacagcaccgtctgggaagaaaggtggaacccaaagaaacataagtcacttttttatggagtcaagagtggatctcccggttactaggtacacttccctgtattagtaatccctgagaaagaaatacaatagatgctttgtggaaaaggcctggaggaattgagctgccctcaatgttgtgttctaaatccttgcaggtcagcaatttgctaacccaaggagggcctgtataatctccctcccctattagtgtattaccaagggctgctctcacagtcttcacagaggggccagtaacacccagaatagcccttcatttctctacttggtggtttaagccttacattcccctcccattaggtagctgagatgtatatatatattttggcacaaggggttgtcccattcccttcttactttgaactgtagtctcccctccttagccaccataaacacaggttaagaaatctgcttttcggccgggcgtggtggctcatgcctgtaatcccagcactttgggaggccgagacgggcggatcactaggtcaggagatcgagaccatcctggataacacagtgaaaccccgtctctactaaaaatacaaaaaaattagccgggcgtagtggcgggcgcctgtagtcccagctactcgggaggctgaggcagaagaatggcgtgaacccgggaggcagagcttgcagtaagccgagatgatgccactgcactccagcctgggcgacagagcgagactccgtctcaaaaaaaaaaaaaaaaaaaaaaaagaaatctgcttttctcctctatgctggctgttaaataggctagagagtgtagaaagtgggttcttttaaggccgggggtggtggctcatgcctataatcccagcactttgggaggccgaggcaggtggatcacttgagcccaagagtttgagaccagcctggtcaacacggtgaaaccctgtctctactaaaaatacaaaaattagccaggtgtgatggcaggcacctgtaatcccagctacttgggaggccgaggcaggagaatcacttgaacctgggaggcagaggttgcagtgagccaagatcgcaccatcgcactacagcctgggtgacaagagcaaaaattctgtctcacaaaaaaaaaaaaaaaaaaaaaaagttttttttttgtttttctttttttgagacagggtcttggtggcgcatacctgtcttggtggcacgcacctgtcatcccagctactcaggaggcctgaagtgcaagaatcgcttgaacccgggaggcagaggttgcagtgagcagagactgcgccacaactacattccagcctgggagacagagtgagactccatccccccaccgccccccaaaaaaaggatcagagacaagtgtaagcaaatattaggaaaatgacactccctattttaatcaaaatatgatctccttgtaacatacacaatgtaaagtagataatcttatccttattttagggaggaggaaactgagaatcaaggatgttaggtaacttgcatcaagttggccagcttgatctctgagtagtggcagaaccagaacccgatttgaaccagcctcactctaagccccagcccttgccacaccaccaccacccatcaattacatatccacaaagaacctccgtctggtcacgtatgaaatgagggattgctgccgtccagttgggaatcctggagtctgaatgccccaccacagacggcagtgatcagaaagatattcttctctggggagggctgggccccatccactccccagtcaactccccacattccagggagatgcagtgagctcttctctgcagccagctcaggctcatgactgcactgccagggaagagagtaacattgctccagacccatttgtacctgactgctctaaaggttaccttggatctgggaaagtttgctgagtaaattaataacataagcaaggacgtaagaagaactttaacctacctcacagaattctatactaagaggccaaactgtttttgagaaccaaaggacaatgcatacaacgagtctggttattcctagagaatcctaactgggagctgacaatattgatggggctcctgccaagtgccggggcctgtgctcatctctttatggactgtttcatccttacattggtattatcctcattttgcagccaagaaaataaactaataggaaggaataagtaacttgtctaaagtcatgcagccaaaattctaacccaatgtctacaaagtccatgacattgcatttttctttttctttttttaattaaaaagagaccaggccgggcgtggtggctcatgcctgtaatcccaggactttgggaggccaaggtgagttgatcacttgaggccaggagttcaagaccagcctggccaacacggtgaaaccccatctctagtaaaaatacaaaaaattaactgggtatgatagcgtgcacctgtaatcccagctacttgggaggctgaggcaggataattgcttgaacctggtaggaggaggttgcagggagccgagattgcgcccctgcactccagcctgggtgacacagggagactgtgtctcaaaaaaaaaaaaaaaaaaaaagagactgggtccgggctcactatgttgcccagactgctcgtgaactctttgttgttgttgttgttgagacagagtttcctttagctcttgttgcccaggctgaagtgcaatggcacgatctcggctcactgcaacctctgcctcccaggttcaagcaattctcctccctcagcctcccgagtagctgggattacaggcacccgccaccacacctggctggctaatttttgtatttttagtagagacaggtttcaccatgtcgaccaggctggtctcgaactcctgacctcaagtgatctacctgcctcggcctcccaaagtgctgggattacaggtgtgagccactgagcctggctaagagaaaggccttgaactcttaaattcctggcctcaagcaatcctcccatctcagcctcccaagtgctgggattacaggagtgagccactacacctggccaatatttgtgtttttttttttttttttgagatggagtctcactcaatagcccaggctggagtacagtggcgcgatctctgctcattgcagcctccatctcccgggttcaagcgattctcccaccttagcctcccgagtagctgggactacaggtgcatgccaccacgcctgtctagtttttgtatttttagtagagatggggtttcatgacgttggcctcgaactcctgatctcaggtgatctgcccacctcaacctcccaaagtgctgggattacaggcgtgaaccactatgcccggcccaaagtttgtatttcttaaaaaggattttacaatgataattttcctcaaattcagagcccgctttctacttagtataactgatggggttttctaatgataatatgaaccgtcccactcccaggaacacaggcagcaggccaagcagtggctctcagtgagggtgagtgtgtgggttgggggaggggcagcccatgaacaccccaagctacttccacactccaatggtcaggagaatgcagaattgaaagcaggaacaggagtctgtggcctggagctcacatttaaccaaatagttttcagagctggctcagaaacagttctccaaaccacagcactctgcaaagcccagctgagatcatcagatggccatcccaggacaagcaagcagaactcctcggcctggggtcctgtttgccaaaaggaatctggatgttgtgagtgcctcaagtcactgactccccctcctcatgaccaggggatgatgagcagctgtttaataagccaccggtgtcaaacccggtggccgggggcccaggaagaaccccgacttgggagtgcagccccttaggcatctcagagccagggacaggaaagaaagacaggttgtgttgccagtgtgactgaagcaaattaccttccctgggctggtttcctttatctatcttgtctatcttttcttacctccctcccgggaccttgagatgccttggaaatcagatgggaaaagcactgtcactcactgcaggggttgtggtaatgctggttactgatgccactgggaacaccaagctacaggagtcagtcatttgggacagtgccagcagtcagagcacaggtcacacttgttccaaaccatggcagtcggtgcttgctgcccaaactattgtctgagtttattttttaagaaataaaaaaaaaattatcatagaatacaaagaacataaaatacaccattgttaccattttttttttctctttttgagacagagtctcactctgttgcccaggctggagtgcaatggtgcaatctcagctcactgcaacctctgcctcccgggttcaagcaattctcctgcctcagcctcccaagtagatgggattacaggcgcccaccactgcacctggctaatttttttttgtatttttagtagagatggggtttcaccatatatggtcaggctggtctcaaactcctgacctcaggtgatccacccgcctcggcctcccaaagtgctgggattacaggcattagccaacgcacccagcccattgttaccattttcacgtgtccagttcaggagtattacatacattcacattgttatgcaacctatctccagaacttttcatcttgaaaatctgagattcaaaaaataaaaataaaaaaatgaaagaaaaagaaaaaaaaaataaaaagaagaagaaggaaaaaagaaaaaccgaaattccatgctcattaaacagctccctattttccctcccccagcccctggcaactagcactttactttctgtttctataaatttgacttgagtattttttttttaatcaacaaaactcttaacttgcactgtcaatatattccaaatattccaatatattccaaaatattccacagcaggcctgggtcatgctggattagcaaagacaaggactggcctagatggagtcacaccctccccagccttgggtttgggtaattctcaacaccctaattcattctcccctggcagctggagagacccgtgggacagccactcactgcagaaggggctggtgagagacatgctcgtcatctccgagggcctggctctgcgccagccacacacttatctgcctgctccatctccggagtttctgtctctgagctttggcaatggaagttgtgcttccactattagccaacaccgagctggactctggtaactgacacagccgtgcatctagtgtagctcgggttgagatgacttggcttttttttttttttttttttttttgagacggagtctcgctccgtcacccaggctggagtgcagtggcgggatctcggctcactgcaagctccgcctcccgggttcacgccattctcctgcctcagcctcccgagtagctgggactacaggcgcccgccaccacgcccggctaattttttgtatttttagtagagacggggtttcaccgtgttagccgggatggtctcgatctcctgacctcgtgatccgcccgcctcggcctcccaaagtgctgggattacaggcgtgagccaccgcgcccggccgacttggctttttaaattgccttctatgaatatatatttgtcctaagactggactggccacatgaaatcaggttttcaaaacggaactgcctgtgaggatgtgtgagtgtggatgtcaggtggcaaggggctgagaaggaaagtgcaagggggcctcccatcccacatgactcacacgttgctcacatacacacacccagccccccccccccaaccccaacacacacacgcagggctgtaaaccatatgattaggctcctgcctgactctcccaggccatctctccctgtggtccagccaccatgggctgctttctgctccaaacacactcaggattgctgtgtcccagggcctgcttggtgtcctctgcgtagacactagaccagagctcacagagccacctccctctcaataatcagctctcagctcaaatgccacctctttaaagaagacttccttagaaacggcctgatttctagtttcaccaaaaactgaccctgagatgagaatttgggtatatggcttatttggaaggtgatcctgaaatgagtgagaaaaggaaatccaaaaaagcaggccagtaaagcgtgtgtcacttaaggagcaggtaaccactgtaggcaactggagctcattccccaggactcctgagagctctcgcaatgtcccaccaatggttacagaggtgtttgccttggagtaattcattaagctgcacgtttgctctgtgtatttttctgtatctggattttacaatacaagattttttgttttgtgttttgtgttttttgagacagagtctcgctccgtcacccaggctggagtgcaatggtacgatctcggctcactgcaacctccgcctcccaggttccagcgattctcctgcctcagcctcctgagtagctgggattacaggcacctgccaccatgcctggctaattctggtatttttttagtagagatggggttttaccatgttggccaggctggtctcaaactcccaaccccaggtgatccgcctgtcttggcctcccaaaggactgggattacaggtgagagccaccatgcctggccattttttgttttttgagagagtctcactctgtcacccaggctggtgtgcaatagcgtaatcactaagtgcagccttgacctcccaggctccaatgatcctcctacctcagctgatactacaggcatatgccactgtgaaagaaaaataaaccttggagccctaaaagcactaagctaaagggaaaagtcaagatgggaactgctaggacaaacctacctcccattctgttgaaagtcatttctctgctcagctgggcaggtggctcatgcctgtaatcccagcactttgggaggccgaggcaggcagatcacgaggtaaggagattgagaccatcctggctaacatggtgaaaccccatctctactaaaaatacaaaaaattagccgggcatggtggcaggtgcctgtagtcccagctactcgggaagctgagacaggagaatggcgtgaacccaggaggtggagcttgcagtgagcggagatcatgccactgcactccagcctgggtgatagagcaagagtccgtctcaaaaaaaaaaaaaaattaggaagtcattcctctgcttactgagatagatgcatatctgattgcctcctttggaaaggctaatcagaaagtcaaaagaatgcaaccctttgtctctcacctacctgtcacctggaaaccctctccctgcttgagttgtcccacctttccggacagaaccaatgtacatattacattgattgacttctcatgtctccctaaaatgtataaaaccaagctgttggctggcgcggtggctcacgcctgtaatcctagcactttgagagaccgaggcagatggatcacctgaggtcaggagtttgagaccagcctggccaatgtggtgaaaccccgtctgtactaaaaatacaaaaattagccaggcgtggtggcgggcacctgttatcacagctactcgggaggctgagggaggagaatcgcttgagcctggggggcagaggttgcagtgagctgagatcacaccacttcattccagcctgggtgaaagagcgaaactccgtctcaaaaaaaaaaaaaagaaaagaaaaaaccaagctgtgtggccgggcgtggtggcttacgcctgtaatcccagcactttgggaggccaaggcaggcagatcacctgaggtcaagagttcaagaccagcctgaccaacatggtgaaaacccatctctactaaaaaatacaaaaatgagacgggtgtggtgtcatgtgcctgtaatcccagctacctgggaggctgaggcaggaggatcgcttgaacccaggaggcggaggttacagtgagccatgatcatgctactacactccagcctggatgacagagcaaggctccgtctcaaaaaaataataataatttaaaaagtaaaaaataaaaataaaaccaagctgtgcccccactacctgggcacatgtcatcaggacctcctgaggctgtcatgaactggtctcaagtgatccgcctgcctcggtctcccaaagtgttgggattacaggtgtgggctgctgctcccagccaaaaataaactttctaaattaactgagacccttcttagatttttacggttcccaccacgaagcctggctaattttaaaattttctgtagagatgggggtgttggcgggttgggccgagggaagagggaggtctcactatgttcctaggcctggttgtgaactcataggctcaagcaatccccccatctctgccatgcagccaatacaagatttttttaaagttcctcggagaggtgaggaggctgaggtgcatgttcaccgactcctgtccctctttggttgaaggttgctcgtggggacacttcggattggtctggggtagaggagcagagaaagccctcaggcagagacccaggacagcctctgcacaaatgggcactgtctggagtgtacagaggacaggagaggccctgaagggtgtccaatgccacctcaccaatgtcacacccaccttcaccatgactttctctatccaaatcccaggggcctaagcttcaggacccctcactggcatgccccgtccaggccctaggagagaggtgttgttactattatcctgtgtttacagatgaagaaaatgacacacagtgagtggaaggaacttgcccacggctagagagcagcagaagagggcaagtcttatccgctgacaatccctttcctaatctttaaggaaacaaagcacaatgatgaaaaatttaaaggtttaaggttttaataatgctccaggtaggccgggcatggtggctcacacctgtaatcttagcactttgggaggctgaggtgggtggatcacaatgtcaggagttcaagactagcctggccaacatggtgaaatctcgtctctactaaaaatacaaaattagctgggtgtggaggcacttgaacccaggaggcagaatttttggtgagccaagatcacgccactgcattctagcctgggcaacagagcaagactccatctaaaaataaataaataaataaataaataaataaataaataaataaataaatgaatgaatgaataataaaatttttccaagtatagtcacaagacaaaaaggagtgactcatgaaaggagagaggacttaaatactcttaagtactggctgtgggttagcacaagaaaggagtaaatgcaaggaactggatagaatgactgatttagtggccgggtgcagtggctcgcgcctgtaatcccagcactttgggaggctgaggcgggcgcatcacctgagattgggagtttgagaccagcctgaccaacatggagaaaccccgtctctactaaaaatacaaaattagccgggcatggcaggagaatcacttgaacccaggaggcggaagttgtggtgagcagagatcatgccattgcactccagcctgggcaacaagagtgaaactctgtctcaaaaaaaggaatgactgatttaggtacaggagagcagtttgttaatacacttgtgcataactttgctcaccttctttttctgttgctaaagtaatttgtaggccaggtacagtggctcatgcctgttatcccagcactttgggaggccgaggcaggtggatcacttgcagtcgggagttcaagaccagcctggccaacatagcgaaaccccatctctactaaaaatagaaaaattagccaggcgtggtggagcacacctgtcgtcccagatacttgggaggctaaggcaggaggattgcttgaacccaggagggttcagtgaactgagatcatgcccctgtactccagcctgggcgacagagccagaccctgtctcaaaaagaaaaaaaagtaatttgtagaaattcacataaaagtagcaaaaaggtatataagttgtccataatcccagctctcaaaggccaccattatgaatgcttttgtaagttatgaatgaatgcttttgtaagtcattatgagtgctggggttacaggcttgagccacccatgcccggccaaagcagatctgtgttccctgttctgtccttcccagtctacttaccttcatttatccaatcacagaccccaagacccacagaccccaagacccacagaccacagtaaaaggtcctaaggtagaaaagccagaccagaagctgagcgctgggcttttcccccaccatgtgccactgtcccctaacatttgtaccagctgcttcatcataaccatacagaaaatggtacctggccagcctcttcctaggttagcgtgcagctccctgacatacttgcaagtctcattccaggtcaggtctgtggtgctataaatccagctctgtctatctctcaactagaggcgtctgggtcaggggcattgcctctgactgatggacactgaagttctgcagctcccgaaggtcacaggaaagaggcgttgaggggtggagggtgaatgttaccctctatttgtaatcttggaatgcagagacgtagcctttgctcttccctctgcccagcactatcttcctcccaaaagctgcaccacttactctcacttccttcagagatcatcttgccagaggcctttcctggccaatctctctttttttttttttttttttttttgagagggagtttcactcttattgcccaggctggagtgcaatggcacgatctcagctcacagcaacctctgcctcccgggttcaagccattctcctgcctcagcctcccgagtagctggaattacaggcatgcgccaccacgcttggctaattttgtatttttagtagagatggggtttctccatgttggtcaggctggtctcgaactccagacctcaggtgatccgcccacctcggcctcccaaagtgctgggattacaggcgtgagccactgcacccggcgtggccaatctctatacagtaaccaccccactcacgcacacccttggccctttccagagccttaccctacttcttcttcacagcacattccacttgttttatatatatatctgtgtgcatacataaatatatatatttggatttattgactgtaccctgtaccctcttcccactggaaagaaaggcccataggggaggaactttgttttggctcttagctgtattatcattacccactagcacagctgcagtcaataaatatttgttgacgggattaatgaaatctctcctcccacttatattactgtccttgcagtttctaatttcaacttacaagtggactatgaactgcaaattactacactgtgcactgatgctaattaaaaaatcattaggatggcctggaatgaacttggcttaattttaatctgccacctgaatgtggtccaggttccaggtgaaaacaaatacaggatccttcaggatttgagacctgcagtacagtaattccagcagagataagcagggctcccggaatttgtcccttatccccttcactgcttaatcacacattgttccctgcccaggccaactggcattacctccagacttcaaaatgcccttctgcagctcctgtgctggttaaagaaagaaaaaaacacagtgaagtccactggagcacattttagttttaatgtgccaggtcccaaagagccagctgagtcgacttggctgccgaggaaggaacggtgaaaagtatgtggacaaaagagatcatttgttgtttttaccccaaacaattctcaaaacatatttcatattgagaatgagacaggcacaaatgcacatctggactgtacatattgttgaaggtaaattcatttgctcagtgagtcaaggttggcaggaagccaaaatgttcagcccttgcttctgatgctgaggcttcagccagtcataaaattatctagatcatttaagacataattacttctatctcagccaattatttcagtagaaagtttttttcttttccagaacaatccttaattaattaaaagtgcttatttcaaaatattttatagagaatgtgtatgtacaggccaggcacagtggctcacgcctgtaatcccagcactttgggaggccgaggcaggcggatcacttgaggtcaggagtttgagaccagcctggccaacatggtgaaaccctgtctctactaaaaatacaaaaattagccaggcgtggtggcacacatctgtagtcccagctactcaggaggctgaggcaggagaatcgcttgaatctgggaggtggaggttgcagtgagcggagatcacaccattgcactccagcctgggcgacagagtgggactccatctcagaaaaaaaaaaaaagtgtatgtacagattaaagaataaagtgaacctcacgtgactacactggagacaggagcacctccagagacccttgagcactctgccattccatcccctttcctctccagaggtaaccaatatccccacctttgtgttaaccaccccctggcatttattcctaattgcttttatctctctgtgaatctctcaaaaacattgtttagtttggaaaaaaactgagcagtaagcacagacctagctttgaaaggggagggcaatgatgctcccacggctccctgaagatgacctgagtggagcttccgggcagagcctggcttccacgtccccttgagttctccagagtctgtctggggttgtgtcacagggcgtagtgtgagtgaggtgcaggctgaccagcagaaacatggtcaaagggcatgggctgctatgaattttctgcctctagactcaccacagctgcagtgggtggaaacagacctggaagagatcaccagtgtccccgggcgctctgggaggcagggcctttcatcttcttcaacctgggcacacctgagcatttttatcttcatgtacaaggaccatcgttgctctgtgatcataaccctccgcatgtctatcttctgagtcacggcggcagtctggaccagctgctcgctattgctaggccggagcacagctgtcctcccaggagctcccttgtcctccgccggcttcaggatccctgtatcccgtgtctcctttttcctggcactacttcttcatctgggggagcacatcatctgatagtttcctgagaaagggcgaaaggatgtagatagacaagcctacctgacgctactcgggggaggtgggctgtgtccaggtgccccctatgcaccgctcctctccgagggcttcctgggagacagcccaccagctgggatgttctaatttggactcagtagaaactatcaaagtggatgcagtctcagaaaactaggaaggtcaggaattgagtctgttattagctgatctcatctccgacaaaaaaaaaaaaagagagagagagagaattgagcctgttgtagtgcacagcattctagcctgggcaacatagtgacacccctctgtaattaaaaaaaaaaaaaattcagcctggaggaacttaaattaacattgtcctggccttggaatgcctttagaaaaacaataggaaaacccctaggcccagcggtgccagtgggaaataaggggagcctgtcaagcactggtgcaccaagaattcaaggcctgggccccacagctctctggcagcagcatttcagccttataaggcagtgtaagttgtttctaggtgctgaggagactggagatatgggcggcagtgagtccacatctctcctcccctacctggcagtcccctccccatccaggcactgataagatattgcagtcctgactgtgtctccctgagatttaagagaggtatcgggagacacaccctatgtgtttggcttccatccccagccctgcccatttgctgctgggagtaaaccaaagcaaaaagcactctgaaatggaaccaagtcaccattctctcctatctggaatctgggtgagactctgtggtcttagtcaaagcatgctgacctgggggcaggggacttgggccccacccctgggagccactagtgcatgctcctggacagtcattatctgggccctgggttagttcctcttctttaaactggaggttgggtgtcaggggttctcctctcatggaacatcagaatcacctggagagatttaactagctgcagccgcccaggccccacctggagactctgatataattggcctgtagggaggcccaggtaacatatttttgaaaacccttagttgattcttgcgtcatccagctgagaaacactcacagatgactctagggacttttgtagcattatgattcagtaattctgataagaaactgtaggtaattttttatatttttttaaagagtctcgctctgtcacccaggctggagtgcagtggtgcgatctcagctcactgcaaactctgcctcccgggctcaagtggttctcgtgtctcagccacggagtagctgagattacaggcaagcgccaccgtgtgtggctaatgtaggtaatattttgcaacataaaatccaagggtaggcgagaagcagtggctcatgcctgtaatcccagcaccttgggaggctgaggtgggcgaattgtatgagctcaggattcgagaccaccctgggcaacacagtgaaaccctgtctctactaaaaatacaaaaattagctgggcatggtggtgcacacctgtagtcccagctatttgggaggctgaggtgagagaatcacctggcctgggcaagtcaatgctgcggtgagctgagatcacaccactgcactccggcctgggtgacagagtgagaccttgtctcgggaaaacaaaacaaaacaaaacaaaaaaaacggccggatgcagtggctcacatctgtaatcccagcgctttgggaggccgaggcaggcagatcgcgaggtcaggagttcgagaccagcctggccaacctggtgaaaccctgtctctactaaaaatacaaaaattagccaggcgtggtggcacatacttatactcccagttactcgggaggctgaggcagaagaatcgcttgaacccgggaggcagaggttgcagtgagccgggatcgcgccattgcactccaggctgggcaacaaagtgggactccgtctcaaaaaaaaaaaaaaaaaaatcgaagggtaacctcagatctcctgacaggtagtcctgtaaaagaaatgtccattgttatctagtattcaacaggacttaactacaatgcaagcactggcttctaattatgcctaaggagagacattagcattctttaatgtccctagagttaaacatttgtccactttcttaaatgttttactctctagactagacaggaggatgggtgtttcctcacttccatcctatccatttaaaaatcacttctttatttatttttgagacggagtctggttctgttgcccagactggagtgcagtggtgtgatcttggctcactgcaacctccgcctcccaggttcaagcgattctcctgtctcagcctcctgagtagctggcactacaggttcctgccaccacgcccggctaatttttgtatttttagtagagacggggtttcaccatgttggccaggatggtctccacctcctgacctggtgatccacctgccccggccttccaaagtgctgggattacaggtgtgagccaccgcgcctggccacttgtttattttttatttatttatttttaagacagagtcttactatgtcacccaggctggagtgcagtggcacgatcttggctcattgcaacctctgcttcctgggatcaagtgatcctgatgcctcagcctcctgcgtagctggtattacaggcacatgccatcatgcctggctaattttttgtattttttgtagagatagggttctgccatgttacccaggctggtcttgaacaactggcctcaagtggtccgcctgcctcggcctcccaaagtgctgggattacagacgtgagccacagtgcccggccaagctaatgtttctaagtccacctgtctttttcctctatcccatgccaccaggaactattaatagcaaggcctgtgacattttggctgctaaagcacagaatctccaaacccgtgccatgcaaggtgccaaattaaagtggatacaaataatttcattcttcacaaatgaatctagagtagactataaactgagactggcaataaaggatttaagaatctttcattgagattgttacttcaatgttagttcttagtgggctgagaaaaataaagcaattgttttttgagaaagtgtcttgctctgtggctgggtgcggtggctcatgcctgtaatctcagtactttggaaggccaaggcaggtggatcacttgaggtcaggagtctgagaccagcctggccaactggtgaaactctgtctttaccaaaaatataaaaaattagctgggagtggtggcatgtgcctgtaatcccagctacttgggaaggtgaggcagaagaattgcctgaaaccgggaggcagagtttgcagtgagccgagattacaccactgcactccagcctgggcgatggcgcgagactctatctcaaaaaaaaatacaaaacaaacaaaaaaggaaagtgtcttgctctgttgcccaggcctgagtgcagtgacaggatcttgggttactgcaacctgaacctgccaggctcaagcaatccttccacctcagcctcctgagtagctgggactatcggcacatgccacgatgcctgattaattttatttttttgtacagatgcgggtctcactatgttcttcaggctggtctcaaactcctggactcaagtgatcctcctgctttggctcctaaagtgctgggattagaggcatgagctactgcacctggccaaatgaagcaatttttaaaaatcagacatgaaggccaggcgcggtgcgtcacacctctaatcccagcactttgggaggccgaggcaggcggatcacaaggccaggagattgagaccatcctggctaacacggtgaaaccctgtctctactaaaaatactaaaaattagctgggcgtggtggcgggcgcctgtggtcccagctactcaggaggctgaggcaggagaatggcgtgaacttggaaggcggagcttgcagtgaggtgagatcgcaccactgcactccatcctgggtgacagagtgagactctgtctcaaaaaaataataaaataaaataaataaaaaatcagacatgacataggtcctcaaaaagcgttgttgaattaatttgcttttcatctccttttattcatttttctttatttttctccacctcctgttttaattttttttagaaactgggcctcactctgtcatgtaggttggagtgcagtggcacaatcacaactcactgcaaccttgatctcctgggctcaagcaatcctcttgcctcagcctcccgagtagctgggataccaccatactggctaattctttttctttttcttttctttttaaaattttttaaatttaaatttaaattttattttacgtatttattttttttgaggcagagtctcgctctgttgaccaggctggagtgcagtggcacaacctcagctcactgcaacctctgcctcctgggttcaagtgattctcctgcctcagccttctgagtagctgtgattacaggtgcatgccaccatgcccagctaatttttgtatttttagtagagacagggttttaccatgttggtcaggctggtctcaaactcctgacctcaagtgatccgcccgcctcagcctccgaaagtgctgggattacaggtgtgagccactgcacccggcttcttttttttttctttttctttttttagagatggggtcttgctatgttgcccaagctagtcttgaactcctggcctcaagggatcttccccccttggccttccaaagtgctgggattacaggctgagccatggcccctggccctgatccacttttctaatatatggctttttaatttgaaaaactgatttccttatacactgtgaaacagcatttctatagctccctggactatgctagttccctcacccaatgtctccacttctaaagtcctcagttactgtgaaactcatttatctttctgcaacattaattttgagaaagttgaagtgagcaaaacttcctggaatctgaaaagaagatccattgtccccgtaccaggctcacaatcagccaaagggggaagtagattttcctgtctgtacaaaagaaggtaattagaattttggttgtaataaattatctatagtctcctctttgaagctgttttagagaatgttcctgtaggccagggtcttagaaagtttcttttgaacgccttgaccatattcagggctcctgggcccctcatcatgagagaagtattgctaaaacggcttctgaccagcagtaactaaataccagaggaagccccacctccaaagccttatggcttgtctgcagacagccatgaaatcttagtttggtggaaatgacatcagatctcttcactgttaactgtgctttgtgccatagaataaagtgattcagttgttcaattattataaaaagtcacttgctggccaggcgcggtgcctcacgcctgtaatcccagcactttggtaggccgaggagggtagatcacctgaggtcaggagttcaagaccagcctggtcaacatggtgaaacgccatctctactaaaaatacaaaaattagccgggcgtggcagtgcatgcctgtagtcccacctcctcaggagactgaggcaggagaattgctggaacccgggaggcgaagactgcagtgagccgagatcgcgccactgccctccagcctgggcgacagagcgagactctcaaaaaaaaaaaaaaaagtaacttggtgcttattatgtgtcaagtgctatagatgccaaaatgaggagaggacatgctattgtcaattttagcctagcacttaaatagcagatctagtatcagtgctggtcagtccaggtcagcatagaaggcagtctgagctgaaagcagatggaggagggaaagctgctcaggaaatggtattgaaatcccaaagcagtccctatgggtggtagggaggagacattctaggaagggggaacatcatgagcacaaactcagaggtgtgatagaacatagcactggaatggaatggcaatcaatccaatcaaggaaagaggaggggcaggtagcaaaggtgggttgatgtcagattacaaagtccatgtgtaattagactaatgaattcatgcccctgaagaatattccacagagaagtgacatgatttattttgttttatttttttgagacagaggctggagtgcaatggcgcaatctcagctcactgcaacctctgcctctcaggttcgagtgattcttgtgcctcagcctcccaaatagctgggattcaggcgtgcaccgacatgcccagctaattttttgtatttttagtagatgggatttcgccatgttggctaggctggattaatttgcattttggaaagcaactctggtttcagtgtacaagagatttgaacaggagattaactaggaagctaaagtaatagttatgaaaggtgatgagagcctgaaattaggtcagtgtctatgagaacaaaggggatggatttcagaaacgtttctaaatcataaatgactgaaccagaagaactgaagctgatgtcagatttctcgcttgggtgatgaggaacaaggcaggaagagcagcaatgaggatagaggtggaagggcagctcaggaatttccctggagttttcccatcttgagacttcggtcttggaagacagaatggctgtgacataatgtggactttttacttccacctctaggaaagcgttctttggaacacctttgctgagtctctctctcctccgctcaagggtaaggcttacttggtagtggggccagattgcacagtgtcaacatgctttctaaggaaaatcccagaaggcggcattcgtccagataaccttgctggctgcatacatatttgaagcttatgtgcacaaatggagttcttccagaaagagagaatggcatttgtggagggtgaatcaattaattcagctactgctttttccaacctcagtttctcaccgtaaacagacagaacagcatgagcaaagtatctggtgttttagggtaaaaagagggaggaaagggcggctaacttatccaccaggcatactaaagtatatgtggttctttacttttaagcaacccacatattcaacattgatatccctattgttttttattttcataatatgtatttatagcacttcttcagaatcagatgaagaatcatgatatacagtttttttttttttcctaaggcggacagagtctcactctgtcgcccaggctggagtgaagtggtgcgatctcggctcactgcaacctccgcctcccgggttcacgccattctcctgccttggcctcccaagtagttgggactacaggtgcccgacaccacgcctggctaatttttgtatttttagtggagacggggtttcaccatgttagccaggatggtctcaatctcctgacctcgtgatctgcccgcctcagcctcccaaagtgctgggattacaggcatgagccaccgtgcctggctgtatatacaaatttttaccttaagtttgttaactttttttttttttttttttgagacagagttttgctctgttgcccagggtggagtgcagtggcatgatcttggctcatggcaacctctgcctcccaggttcaagccattctcctgcctcagtctccctagtagctggggttacaggcacatgtcaccactcctggctgatttttgtatttttagtagagacagggtcttgccatgttgcccaggttggtctccaactcctgagctcaagcaatcctccttcctcagcctcccaaagtgctgggattacaggcatgtgccaccgagcctggctaactttgttaactttttaacataagtaaacatacttgcagaaaagagcccagataggcatatagcatgatggatcttcacaaaggaaacatgaccatgtaagcatcacccggatcaaggagggcatggttggcacaccaggggcagccctaatgcatgctccctgccagccaccaccccccctaagtagcagcctactaatggaatcaattggctttgtctttgaactttatatatattaatcagtagaatcacacaagaactggcttctttcaatcaacatctatgagagtcacccatgttgtcgtagccagtttgtcattgctgggtcgtactacgttctagtgtgagaaaacaccacatttatctgttctgctgatgaacatttggtttgtttctagttttgatctattatgaattatgctgctattttggtgaacatatgtatgcatattcatttatatgtgtgtaggagtggaacgttgagctattcacatgtctctctcttttttttttttttgagacggagtctcgctgtgttgcccaggctggagtgcagtggcaccatctcggctcactgcaacttccacctcccaagttcaagtgattctcctgcctcagcctcccgagtagctgggattacagatgcgcaacaccacacccggctaatttttgtacttttagtagagacgaggtttcaccatgttggtcaggctggtctcaaactcctgaccttgtgatccgcccacatcagcctcccaaagtgctgggatttcaggtgtgagccactgcacctggccagccaccgcgcccggccgacatgtctctttatcgtttttatttttttgggtcttgctttgtcacccaggctggagtgcagtggcacaaacatggctcactgcagcctcaaccttctgtgctcaagtgatcctcccacctcagcctcccaagtagctgggactacaggcagtcacaaccacacccagctaatttttgcattttttgtagaaacggggttttttcaccatgttgcccaggctagtctggaattcctgagctcacgtgatccacctgccttggctcccaaagtgttgggattacaggcatgagccactgcacccaggtctttatcatttttcatatgacaaaatcaaacttctttttatttttgagacagagtttcgctattgttgcccaggctagagtgcaatggcatgatctcagctcacagcaacctctgcctcctgggttcaagcaatccttctgcctcagcctcctgagtagctgggattacaggcacacaccaccatgcttggctaatttttgtatttgtagtaggtatggggattcatgttgaccaggctagtctcaaactcctgacctcaggtgatttgcctgcctcggcctcccaaagcattgggattacaggcatgagccactgtgtctggctcatatgacaaagtcaaacttctattacctggtgagcaaacattaaaaattctcacctggaggagctgtgccccagcagtctaatttggacaaacatgttgttgaagaacagttcattcacttcactttattcaatgcttcctgcatgccagaatccgggctgggtgctacagagacactgactgacagaatccttgcccttggccaggcacaggtgctcacgcctgtaatcccagcactttgagaggctgaggtgggtggatcacttaagtccaggagttcaagatctgcctggtcaacatggtgaaacctcgtctctactaaaaatacaaaaatcagccgggtgtggtggcacgcggctgcaatcctagctactcgggaggctgaggcaggagaatcccttgaacctgggaggcagaggttgcagtgtgccgagatcatgccactacactccagcctgggcaacagagggagactccgtcaccaaaaaaaaagaaagaaaaagaaaaacaaatgctgataatagtgataagcgtaagtctcataatccaaagcaaaagtgataaggttagagtctgaatcatgagcaataccatctcacccaaatctatttggcttctcagctttggaaggtgagtagtgcaatttcaaatagtgagggatttgtccaaaaaatgtatccaaatctgttcagttcctgagttcaaacagtgagatctagaatagtgacagatacaaagtatagaatactatacttttacctaagttatatctacttatactttttagggtaataaggcattttacaacatttttaccttttggaaataagatcttccagtaaatactacttggacatg

SEQ ID NO: 53 - DNA, 23947 bp, Homo sapiens
aaaaaaaattagccaggcgtggtggcacgtgcctgtagtcccagctacttggaagaatgaggtgggaggattgcttgagcctgaaaagtcaaggctgcagtgagccatgatcgtgtcactgcactccagccagagcgatagagtgagtccctgtctcaaaaaaaaaaaaaaaagtttggtaacacactattcgcaagggtgggaggaaaacaggcaaccccctgcattgctggttggtgtgtagactgactcgacctcaaaagagaatatttgggcagtatttatcaaacatataaacacatgtcctgtttgacttggcacttccagaaatttatcctacagataatgctcacacgtaagtgaaaggaatacacaaggctttccactgcatcgctgcaacattgagccaaaaccacaatgacttttgcaccaatctaatagctggagacaacctaaatgtccaccaatagagatgggataaatgaatgattattgtatgccctgcaatggaatgcatatggctatcaaaaataactaggattctccttacagaacgctccccaggacaggttgtttagtaataaaacctagacgcagagccgtgttcaagtcgtttatcaattgtacttaaatggaaaaagcacagagacacacaatttgcttttatatgtgcacgcgctgataacacgagttgtttcccaggaaggaaactggagctggagaacagggtgggaaacgcatttttcagcatatccttttgttctcttgaatcttgaaccatgtgaataccgtgtctaatcaaaatataaataaaattaaaagtgaagacgaaagaccagaagattaacaggctttataatataattttttttttgagatggaattttgctcttgttgcccaggctggagtgcaatggcgcaatcttggctcactgcaacctccgcctcctgggttcaagcgattctcctccctcagccttccgagtagctggaattacaggcgtgtgctaccacacccacctaattttgtatttttagtagagacagggtttctccatgttggtcaggctggtctcaaactcccaacctcaggtgatccacttgccttggcctcccaaaatgttgggattacaggcgtgagccactgcgcctggctataatataaaaatttgaatgccaggtgaggtggctcacatctgtaatcccagcactttgggaggccgaggcaggggcatcgattgaggccaaggcaacatagcaagaccccatctctattttaaaaactttttttaacttggctgggcgcagtggctcatgcctacaatcccagcactttgggaggctgagtcaggtggatcacctgaggtcaggagtcccggccaacacggtgaaaatctgtctctactaaaaatacaaaaattagccgggcatggtggcaggcaccggttatcccagccactcaggaggctgaggcaggagaatcacttgatcctaggagacagagattacagtgagctgagatcgcaccattgcactctagcctgggcgacaagagcagaactctttctcaaaaaaaaaataaataaaaattataaacttatatttgtggatgaaatgatttgatgtctcaggtttgctttgacctaatccagaaggggtggagaagtcaggaatgctcaatacagcatgatttaaaataggggaaaatcagaaacaattagatgttcagtaatggaggattggttaaataaattatgggcttctatatgaaaaaagtactatgctaccattctaaaaacaataaatcatagctggacgcggtggctcacgtctgtaatcccagcactttgggaggccgaggcaggtggatcacctcaggtcgggagttcgagaccagcctgaccaacatggagaaaccccatctctactaaaaatacaaaaatacccgggcatggtggcgcatgcctgtaatcccagctactcaggtggctgaggcaggagaatcactagaacccaggaggcagaggctgcggtgagccgagatcgcgccactgcactacagcctgggcaacaagagcgaaactctgtctcaaaataataataataataataataataataaatcatattttagaagtattgaaagagtactttctgttttgttttgctaataatcgtggagtgggaagacctttttaggtatatgaaatccatactccacaaatgaaaagaccgctacagttgactacataaaggtaaaaatctctgcattgcacaaccaccacaagcaaagtcaaaaagaaccctccataacaggggaaaattagctatatgttgctaactgttgactctcagagatgggtatattgagggttcattattactgttattttttagtgtgttttcaaatttccataacaaaaggaaaacttaaatatatacaaacttctgtatggcaaaagccaaatattacactggacaataatatttgcaacacatataaacaacaacagattaatatcaataatgtcctaaaaaggtcctacaaggtgtttgtaaaagacataaaaacaggccaggcgcagtggctcacgcctgtaatcccagcactttgggaggctgaggcgggaggatcacgaggtcaggtgatcaacaccatcctggctaacatggtgaaaccccgtctctactaaaaaaaaaataataataatacaaaaaattagccgggcgtggtggtggtagcctgttactcccagctacttcggaggctgagacaggagaatggcgtgaacccaggaggcggcgcttacagtgagccgagatcatgccactgcattccagcctgggcaacagagtgagactccgtctcaaaataaataaataaacaaacaaacaaacattagggcagaataggacttgggaaaataaaataaaataaaaacaacacaactgaaaaccgggcaaaggattagatctgaaacttcacagaggaggaaattttaaaagccaactaacaggtgaaaagatgtttaaccttagtcatactcaggaaacacaatttcaaaacaatgagatgtcagttttcacttatgatgttggccaaggtctagaccaacggataacatctagagtcggccagggtgtggggaactgggatccccccacagtcctggggcacatgggaatcgctatgaataaaatggcaagccctattcacaatttaaccacagctaccctttcatccagtgatcctgttttggggaatttatcctaaacccagggagtaacgaaactactgcttaaaccattcatgcaggaggaggcttattagagcattccttgttcgagaagaaaaataagccaaaatgtctgtagagcaccctttaaacaagtgaataaaggtccacaggaaacagtgtacacagtcacagagcgtgtgtgctaactctgtatgtatcaccttggaatgatgtctgttcgtacatttttaagttcaaaagcaagttccaagcaatgcatttcatctcaccctctattacaacagccccagggattgtccccattttatagaggaagctgatggctcaggcgtgagtaaccaccccaggccagtgcccagcttgtgtcagaccttccgaggaagccacatctgtctgacccagcaaagctgcagggtcctctctctgggtgcgtcattcgggtgtattgtcatgagtgctgggatgaaatggaaatgaacttgccaaattattaacccactctgcctcagtgaggttgacttgagccaggggtgggctgggggagggagacaggggagagactatccattttttccttatatgcttgtttattctttgaattgttagaacaaacgtgagattttcatagcaaccacccaccactacaaaaccattaaaatactgcttaaagggtgaggtgcagtggctcatacctgcaattccagcactttaggaggcagaggaggttggattgcttgaggccgggagttcaagaccagcctggccaacatggcaaaaccctgtctctactaaaaatacaaaaatcagccgggcgtggtgacatgcacctgtaattcctgctttttgggaggctgaggcgcaagagttgcttgaacacaagaggcagaagttgtagtgagctgagatcgtgccattgcactccagcccaggcgacagagtaatactctgtctcaaaaaaaaaaaaaaaaaaaaaagagagaaaagaaaaggtggaagtgggaggggcaggcaggactcagaatgatgcctccctgctcatcctgcgtggcatcccttgctgccacctccatctcagtaactcagccccacgtggtgctcggaagagcccttgggagagggtgcgtgatctcagggcgtggcagcttagtgggggactttccccaaagactccttctctaggctggagtcccttggtgaggacgggagcagctgtttctaaacctccctctccccacaagcttaagcagcacaggctgcctgcaggcactttggtcagctgtgtgtatgcgtggctcccgtgcaccgaggatgactggtctacctgggcaacaacagcagggataataagctccgtgggcgcagggttcctgcctgcgctgttttccactgtatgcagcacttagcacaggacttggcacatatagggcgaactaaagaaccaaagcagggcatgatggtgtgcatctgtcattccagtttctcaggaggctgaggtgggaggatcgctggagcccaggccttcgaggtcagcctggatagaatggtgagatgacagaaacccccacactgtgacgagggagggcaggagaaggtgagtgtccatggggcactgttgaggaatgaggtgcattgtcagatggacaggtggagggagggtgtccgtagcagagggaccaacatttccaaaagcagggggtccggtgcatggcgagggggaggctggagtgctcagggacagtggagccctgaatgccgagctagggaattgagctctattcctgggaatcctgaatccctgatgaagttggagaaaaggacactgatggaattaggtttgccttttagagagagcccctggggacagtttggggaccagattggaagggtgccaggtaggaggcaggaagagcagttggtggcgggtgggggggtggggtgccctccagagacagaaggagagcagttcagggatattccagaggtggcttcaggaggcctggtgaccagcagtgggggagggagtcaggggaatggggcaccagggctgctgctggggctggggagggcagtgctagagtcagtacttcctggcactgagattttttttttcaatttcttattgctgttgttttcaagaactcagtttggattttattataaaattgattaaaaacacattttttggaaaaaaaaaaaagacaaagagtagcttttacaatgaacttctttgggaactttctcaggaagtgggaaagggcctgttgttgtccaggctgtggaagggatggaaaggacctagagcccacagaggtccctgaggtggcagcagggcagggcagagtggggtggggggaggaatggaccaggcaggtggggacgccaagtcccgcatggcacccctcggcgggctccctccccagtgccccctggatgccacacctaagcacggatgtggttcccccaggagtcccccagggcagggcagggcagggaccctgcagaggaatgctgggtaggaggcagctttgtggtcagacagacttggcttcctcagaaggtctgacacaagctgggcactggcctggggtggttactcacgcctgagccatcagcttcctctgtaaaatggggacaatccctggggctgttgtaagaattaaatgagaaaaatcctgtacagcatttagcaatgcccagcccttaagaagcccttggagaggagccccccagggattgtcttagtgggtctttgaccaggtggtgtggctcacacctccaagctgtcccctctacagagggggttgggtgggggtgggagaggagacctcatgccttccgatctgtcctgggcatgaggtctcctcttctccatcacggatgtcccacccactcccacgggttcaccatctccctggacaccatcctccattttcacccatggcctaagacgtcctgcccagccccctccacagaaccagctccttgtagtcatctgaaccgggcatcctgggggctctcaaatatacctccaaacctgaccctgccatcctgcccctacaccttggccaagggtgccacgcccatcaggctctttgcctccctgtcccctatccaataggcctcaattctgctcaattctgcagccactgccctgtgctctgccttaggggaggacgcggcagccgctcactggccactccagcctcctaggtggtccccctgccctcaccacaacctctgctccactggcagccggactgaccttttggagatgtcactgtctccctctctctcccctaaattgttgaaaatccttcaggactccaccaatgccaaggtcaaactccatgcaaagcatcacgctgcctcctctcccaccatcaatgcatcagcctttccctggacctgcagcagcccccttgcctctctcccctgggagggggactggcggcaggctcccccgcatggagtctgctccctcctgagtgtgcccggcaccggcataaggcagactgccagtaaaagagggctgaggacgggctggtggtgctcgggggttctgtcacctgagcggtccctcaggtggctgcattcctggaatttctcttcttctgagccctcaggaggccgtagcggttccacccacccaacttggcccatattgctccagggcacctggagaaaggaccccgactgtcttgggaagaggcccacctgcatctggcctccctagccctcagatctgcatgaaacgtggctcccactactggctgcctacaggggaagcggggccacaggctgagtggtcactgaaattcactccaggcttctgggggctggggcctgcacacagctggaggtttcagggaagggttaggccagatccccagtccgacacttgtacctttgaagggggcagagcgtggcagttaaggatcaggcttcatatcttggctgtgacacttattagctgagtggccctgggtaagtcacttctctgtgcctcagtttccccaccagcagatggtaacgatgctttgcctctcagggtggtagtgagcagtgagcaaatgcatgagaaacgtgccgggcagcagggctcggtgcatcctggccatcttataccatcattccaggcagttccgggcctcgtagcctctgactccatgcgtcctccttcagccacagtcccaggcctcctgctccccatgggggtggcccaagaccctagggctcaatgatgtaatgacaaaagtgtttagcaaccggcagagagtgggcgcagggtgcagggcgttggccctgactttagcatttaccagtttccatggtgtaaataaataaccctgccctgtccaatttcaagctgctgtggatgtggagttgggaacagatgcccagtggcacaccagggtatgatgtctccaccgcacagatacaagaggcgtggataaccccaaaagcagaaatgatagtcaaacatgttaacataatcaggaagtggtaagtgttgcatattacctttgctcttttgacatactttgtgagcatatgcaatttaatttttaatgatggctatgcttgacaactgacccatgacattactgaaatgtggacagctggctctcccaagcaagtccaagttggccccagccccctgcggtgctgttctgtgccgtctcgcccagggcaccaggacctgctctgaaaactctgtggggcctggcttcagcccaccttgttttcatcccacgtgtcactctttggaacaccatgtttaagcaggggccatctctgggtttctttgtgtagcccgtgttcaatcctaaggaccctcactcctggccccttgtctgctagtcaccttccacccaaggttaaaaagcacagggtttctagccaggtgtggtggcgtgcgcctatagtcccagctactcaggaagctgaggcaggagaattgcttgaacccaggaggcagaggttgcagtgagccaagatcatgccactgcaccccagcctgggtgacagagcgagactctgtctcaaaaaaaaaaaaaaagcacacagcgtttggattcaggcacacctggctcccattctggacctgacctttcacagctgtgtgaccatcagcaagtaagttaatcccaaagagcctcatttgtctcatctgtatgatagggataattcactgacaggtcacctcaaaaaagtttccttgagtctcttggtcgtccctccctcccacccgtctccccaactccattcccaggcagccactcatctgctttctgtcactatagattggtttgcattttgtagaattttttttttttgagacagagtcttgctctgttgcccaggctggagtgcagtggcacgatctcagctcaccgcaacctccacctcccaggttcaagcgattctcctgcctcagcctcccaagtagctgggattacaggcatgtgccaccacgcccggctaattttttttttttttttgtatttttagtagagacggggtttcaccatgttggttaggctggtcttgaactcctgacctcgtgatctgcccaccttggcctcccaaagtgctgggattacaggtgtgagccaccatgccaggtggacttttggttttgtctgcagcctggctagtttcagtctaggctttccgccttccctttgagcctgtgagagcttccccacagcccttcagcgagtgcctttctgggttggttctctttgcactgggaatcctgactggtgcaagggagccgctgtgttcccatttcccagctgaggaaacacaacagagagaggttaggtgtgttgcccaaggtcacacagttggaagtggcagaggcaggatcaaaccaagttcacgtctccttcagggctttaggactatgtatcatagtaaaatgccctctcacacaccattctgaccacctggaagtgggcagataagggactggctcagggtcacacagtgagacaggaagctgggcctgtgcccccaccacacagtgcctcctgccctcaaggctgagtagagcgtggagcttcacgcatgttgagagggaaatggaaggagttgaatgcattcattgatttgttgagcaatctcgtacttactgacagctgaatatgggtcaggcactgtcccaggcaccagcaaggcagcagcaaaacaacagtgaaaaagagagtcgacatggcacacactgtcatatcgggtgacaagcgccacagaggacaaagtggggtgagggatggggagtgaggggagaagtggctgcttcagccaggtgggaccgggaagtcctctgcaggtgaaggctgagagaagtgaggagcaagggggacctgaagacagaggcagaggggatggcaagacaaaggccctgcgtgggaatgagcccggcaggtttgagaagcataaaggccagtgtggctggaaggagggagccaggcaggggtgcaagatgaggatgtggggtgggtgggggcagctaagcagggccttgggtttctttgaggctggtgggaagcttttgggaggctttaaaggctgcagggcagtgggggtctgatgaatgcatgaggtggttcactctgcggtggagcgatgacatgagccacaaggagacagagggggaggcagagacactgctgaggggcctgaggggttgtggtggtgtccgggcagggacactggggtggaggatgcagtggtgacatgtgggctccaggaccactgactatcgtgcaggatctggtgctggggggcagtgagttctcagggagggaaactcgtgtcagggatgagaagacaggggctggggatgccggggactgtgggcccagagcaaaggggagctgtgacacccagagaaagggtggcctttggcctctccagggcaggggagcccagggcagttgggcagagctgggctggggctgagccagttgggctgacaagaaggcttgggcgggacctgacaaggaggacttgcttcagggtgtcaacctgtaccaggctcaggctgcaaggccaggtagtgtcaccgtaaccctcacctggttgacacagggtctggacccaaggatttccttccaaccctgtaatatcattatgtactttaaacagctactgggctgcttgacagtttctagggctgaggcagggcccaaatggtggagaagaggcagctagaggccgggaactcagaaggggaatctcagcaaaaaacaccccgaaggagctgagtcctgcgggagctccctctacgtgaactgacgggtgttgtgggagcaggtccagccacacaaaggaagttccagtagagctggctcggcagttgacagtttaaatcctggcttgcctcggtgctgctggcttcggtccgcagctccctctagccagcccacacccagctggggagccactcagggctggacaggggtcagggaaagggcattcatgtcaagtgccccggaccaagaggccggagaaaaccttcagttccaggttgcctagggcaaaggtggtgatctttggcagcacaaagtgccctgggtttggggctgtcctttggcctccagtttcagtgctagcctgggagtgtccagagagatgaagtatgagatgacttgtccctcccaccacagtgcccaagtgggaggaggcacgctgacccatgcagccacacacacaacccacaggcctcatctctgactctcccaggcaagcaaaggagcagactgcagcagccctgagatgtggctgttgcctcggaaggaatgttgccttggaaggaagaggaagggatcccggcggaaggaagaggaagggatcctggcggcagagcccacatgtgacaccagtaacccccaacccctaaatcagctacctccatcctgattggtcaatgcctgagccatgctggttggtaaatattttgagcatcacctcattctgcggaaccaggggactcatttgtgaaaactacctggaactcctgtctatcaattttagcttagcctttctttcacagtgtgcaaagggcgttcattctcagcaatgcagaaggcaacctccagcttgtctctcctgaaattgcagcctggtccttggaggctgggggaggggacacccctgtttccaagtgctcccgggaggccaggctgtcagagctgtactaaaatgtaaggtttgctcttgagaaggctcaaagatcccacttctcatgggaagcgtggagtccctgcaggggccccaactctcatccaggcctgcgaggtcagaggccctctcactggtccccagattcgagctcccgccgtgcttgctgggactgccagatgtccctcctgactccagggaaaggaagttccaggctcctctcccctctgacccccataccgtgggtcctgccagttgctagttgctcttctatgtcttcagacgctccccatcttaagattcactttctgcagaccccaccacctcctcaaccattttatctagctgtgcctctggatacgggtgtgggaccccactgacaggccaggccagggccagtgtgcatcaccatccccgtgcagtgccctcctttaaggcccactttggtttctgctgccctcatttcctcttccccttctgccaggacctgagctctttctccttcccagcatcatcgaacttattccatccacctcctcaactcccattccctctgcaagtctcagtgataagagtagccaatgttgactgagtgagtccttcatcgtccgcatcagtgattcactgaatccacacagtaacctacaaggcaggaatcattaccctctttttcagatgagcaaactgaatcttccgaaggttcagactgcacattgcagagctggactgtgacccacactaagtttggacctgccccaccatgaggctagagccatctcttcacagttctcactcggggggctgggctggggccaatggaagcctgagagaggccgtctcttcctggtccccctccccactgaaagtgcttccttgacttgaagtcgcccgctgtccagatgctcctctctcccctgcccacaggctcagtcctcaaccctcttgtccctcggccacagcgctcacccccacacctccaatcatcatctctgggtggagactcatttcctctcctgcccactcagtttcccagctggctggtggacatctgcccccagagatgcttggacaaccccaaccgaatgcgttccacatccaaactcctgattgccaccctcccaaaccccctccctctctcgagagccccatccttgcgcctcctcgttacacgggctccacctgccaacaccagctctgccattctcctctccctcagcctccacgagccatcatcgggtccttcccacttcctgcttccaataccactattctggttctccttcccaagtgctgagcacagggacctggagagcacatgctgagactgttagaatgaactgccatttgcctcaaccgttcactcatccaacagttatttattgaacgccatggaccaggtaccgtgcccagcagctgggatgcagcactgaacacgagacaagcccctgccctggaggggcttacatcccggcagggtaaacagccagtaacttcagaaaccaaacatccagtacgtcagagtgccatgggaaaggtacgctgagcaagggcgggcagtgccagggctggggtgccactgtacagggtgatggggaggccctcctccctggagagggcggcatgatcctagtgggccgaggtcaaccgccagggtcaaacggaacacaacccactctcaggaagacatccctaacacaaatccagggactttgtttcttaaccttaaaattggaaacacttcttgctaccagggatggggggtggggctcagcgtttggggaaccggagtgggagtcttttgctgaacagacttttgttttcttaagttttgaactacatgaatgtatttccttttttgaaaggaaaattgaaataggaaaaaattttaagtcttttggaaagaattaatcattttcatggaactgcttccctataggggcctgttttcgtatctgccaacttccactgaaacacgcagatggagaaccctccagtgctcccgagaagggagacagtcttaacccagaggacagcatccaccagcctgcaagcacggaccccgtgctggtgtgtgagtgcagcacacactgggctaaccatcaccacagtgagactggcaccctctggggtagggtagactcaggaaggtgaaaatcaggatgtctgccaggagctgacaaatccctctgggactctcatacttcagaggctctccagtttggctattgctaaacttggactagcccctactaccgatcttaatacccatgtaccaatcattgctgcatcctatttggaaagcaatggacagacagccacgctgaaagcccttactagagactggtccacaagatcagatttagctgcccctggtttgagccttgctcccctggtgtcttttctggcgaagctgggcccagagagcgttttactaagtgggctccatggtagtggaagtggtggggacagaaggctggctctatatgtggcagaggcctgaataaacagggatttgagagggctcaagatatcctgacttaatcctcaatgtggcaggcacagggccatggccaggcctagaggaaggtgggctgtttggggtatggcccagcagggcacgatgtgatcaggtagggcgtagggaaatgggttactgtcctctaaatattccatatatcacaaagttactgactgcggtctccacaaattcaggctgccagtccgatgcactatatcccaacaatctgagcactctgtcaaagatgctcacagagacaacaggagcagacagagccttgtttctctcttaatcttcagagcctagaactgagcttggccctcaccaggcacttagaaattgcataatgaaagaatttcagatttttattagtggcagtgagcactgaaaacccagtatttggccaggtccagtggctcacacctgtaatcccaacatgtttgggaggccaaggcgggaggatggcttgaggtaaggagttagagaccagcctgtgcaacatagtgagaccttattctactaaaaaaataaaactagccaggagtggtggttgcgtgcctgtggttccagctacctaggaggctgaggtgagaggatcacttgaccccggggcttcgaggctgcagtgagccatgatcacaccactgcactccagcctgagccacagtgtgagacccccatctcacaaaaaaaggaaagcctagtattctatacaaccttaacctattttttttttttttttttttgagacggagtcttgctgtgttgcccaggctggagtgtagtggtgcgatcttggctcactgcaagctctgcctcccgggttcatgccattctcctgccgcagcctcctgagtagctgggactacaggtgtccactaccacggctggccaattttttgtatttttagtagagatgggttttcactgtgttagctaggatggtctcgatctcctgacctcgtgatctgcccgcctcggcctcccaaagtgctgggattacaggcgtgagccaccgcacctggccaaccttaacctatttttaaaaaagatgtttatggctttgctgatagcaggctggaaagctagctgaatttgcaggcaacctcaagtagttaatgaaaaattattgtggcttgtccaaagggattgagttttccaaataaaaaagtgggcttcagttttatgtcattgtaagaggccatgtgagggatgtttggatgctcgctttgaatctgtaggaccactcaatgattttttaaaaccattggtttctggcaggcaaaacattcaaaatctaggctatcccaggaaatctagcataagggctgtcctgcagtaatgcattaaaccacgtaacaaacgaactcaagaagagggatgtggctctggatttgtgaccctcaacataacatttaccaccttgggcttcggcttcaacatcagttaaatggagggacacagacgactctttggctcttatactctatgacatgatcactggccaccttagaaaatcaagcctatttagaccacggtttgtgagaagtcagactctctgaggctcagtttccttatctataaaaaagaagatgataacattgggagaagccatcttaagcagcgaggaaagaaaaggacagtggagtcaagtgaacagtctcagatctcagccccgtgtaatctaagggaaggttactggagctgggtctactttcgtcatctgcaaaatggggataagaatgcctgttgtaaggacagttgaatgatcttgctcatgccaacttacagaaggtacgaaataaacgccgatctcctttattctgatctcacattcagcaaatgtgagagaaatgtgaatgtactgaaatgtctgccagaaaaaagaaaatccaacccctcaaaagaatgacatcaggggttttgatatctattcacctacacttccctcttccacaggaagcggcccaccttctgacccacactgcccatctctgtgcttatcatggagctttcaagagtgaggatcggaggctgtattgagcagtgggcacaaaccacagggagcgctgttcaaaaatggaaaacaaggtggccctgacaccgggtgctgctgggcaccctctcagacctgccctgcaacagcatcaggaggctgagggtccccagccagaaggcccaagaggggcccaggctggaaactttactgcgaagcagccctcatcttaaggtggctcaacaccacacctgagatctagcccatgcgacagtatggaagcaggaggccctactccaccacagaaagaacatttatgggcgcctaagccctgggagaatggcacctgagggaacagagcgtgcccacaagcagaccttggggagggagaagaggcagccctgctcctagtcgcagccagcgtgcgtcatgtccaggccccacaagggtgaccctggctcaggttctcatgctccagaagctggcccaggtggcagtgggttccctatggaggcagctcatcattcacaacacagcaacaaaccttctgctctcatgaggagaatgtattttaaacttgggaagagtcataattctgggatgtttcacatgttgtcagctttaaccttctacagacacaggccctctcctctgtgaggagggacctctggcatgtgtgggtgtgtggtgggtccctctccctattagcagaaatgtgttgggcatgagccaggtttatgatttggattgtgtcctgcacataacacctgtgagaatacaactgggactaggacaatgcgggaagcatattcttcatgaggcggtaaccaaaaggcttggctataccaaaggattctggtggccgggcacggtggctcacacctgtaatgccagcactttgggaggccaaggcgggtagatcacttgaggtccaggagttcgagcccagcctggccaacatggtgaaaccctgtctctactaaacatacaacaattagctgggcatggtggtgggtgcctgtaatcccagctactggggaggctgagacaggagaaatgcttgaacccgggaagcagaggttgcagtgagccgagattgcaccacagcactccagcctgggtgacagagcaagactccacctcaaaaaaaaaaaaccacaaaaaaacacaaaaggattctgggtgtaacaatctcagtagagccagcgggtgactctggttctcctaaaattctgcccttacttgccactcaccacacccccagatctgaagggccagcccttttctacctatgacacctcaccagcaagtaaagggcacaggacctcagaagtctgtggtgctaaggatgaagactctactcagagaaggtgctcagccctagtgaggaggttctgggaagcaggtgggcctgctcaatgcagtccctaacccttgggagcatccatgtgagaggtaaaggtgcaaatgacttgggcatgttgactccctactgaggaaggcagggcccctcacatctgcagtggccgtatgcatcagagaacggcatgactgcacatgtgagaactgggtgcacccgagcagtgtcaataggaatcccttccctattccatgccaaacagtcttccccagacacaaagtttccaggtcctgaggcttgactcttctaaggctcaaaatgggttctgtttccagacgtgcttgccttgcttgtctttgcttgtcttaaggactctatttcaggccaatacttgatcctcagacaaactgggacaggttgggaactttgatgttgagatcgccaatgttgatgttccgaggaatctctggcaggttgatgtttttcacagcagacacagcccgcgcaggggctgctgaaaggccaccctaagaagaaatgagaggcgagtatgagacaaattctcactgttatctgcttaatgctaaaaaaaaaaaaaaaaaaaaagcaaaaacaaaaacaaacaagcaggatgggtgtggtggctcacgcctgtaatcccagcactttgggaggccgaggtgggtggatcacctgaggtcaggagttcgagataggcctggccaacatggtgaaaccccatctctaccaaaaatacaaaaattggccaggagtggtggcgggcccctgtagtcccagctactagggaggctgaggcaggaaaatcgcttgaactcagaaggcggaggttgcggtgagctgagatcacgccactgcactccaacctgggcaacagagtgagactctgtctcaaacaaacaaacaaacaaaataacaggtgaaggatgcctagaaaaattccaaactgagcacacacaactgaagttttaactttccccccttattcctcaaaagtagccaacaaaacaatcttgaggttagatggggtttggcacagggatccaaagcctgcagtcctactagactaccagctcctcagaggcggagtgtggcctatacagtttcacagccccagcctctcacagtacctggcacatggtgggtacccaataaatgctgaaataatctaaggtgatttgtcaggggcacttttctggttacaaaacaaaacaaaaccctttcctcaagagaccaaagactcttattgaaacgtgcaaagtcaccgggaagttcttaaaaggaaaaggacagtcacagctctagggcaactgcttgccaactaataatgtgagatgaaaagagctggctttggaagtgtcatgtggcaacaagctgggagaaggtggggggtatcacagataaagaagagctggtgacaaaacgcaaagagtatgcacatctacagtgaacccccacctggcaggctcacccccacgtggagggaacggcaaaagtggatgaaaactctctcacaatcatttttcccctattgccttctttccggataccaactctgcttctgccctcacccagcaagtctccatttcttctcatttccaacccccttgcctctgactcacttactattcctggaatcttcccagcctacatttctaaaagaactatagctgccaccaatagctgtggtctggaaaagcttcttccacaggactgccagtcctcacagaaagaagaattcctggtttcgcaagatcaagttccgtatacaaggcaaagaagctctttaagacactcagataattaaagaggtaatttgttctgctatttctgcatgtgaaagtatacgtctgtaacctctgtgctctgggaaggctgaggaaggggacggcgagacctcagagggataggacagaatttatgtgaacatctctatcaagcccagcaccatgtgggggtggactggggtatgttattttcaagcctagcccaaactctactgtagttttttataaagctaactggaaataaggaaattggcaactctgaggtctgaaagacaccacgagaaatggctgctgggagatcagactcttagagcacacaaactaggaaaccacactggactagggaagagggttctgggtccctccagggaacgagtggctttcaaaggaggaattacaaaccacaaacatgggccataacccccaagccagaagctgtttgccttcctctgccatctggcttttctatttgctcttctaccctgaaaatctgagatttcaaacttgttacctgtttaattttcagggctggctgaccttcaaatccatgagtttcaatggactcaaggaagaaagaagatgagtatcatttcccgaggtttcacagcaacacaaaccaacacatgtacacactcctgcctctgcccaggttttctctacccagccagggctagagcacagctgcttactcacctcggatttctccagcctgttttgagcctcaatctgagccacgatttcattcatgtttgtttccaacaccatcccacccatcaccacctcctggaggatgtagtgcacctaaaagggaagcaaaaatcaggagtcagaatactctgtggtggtcagagtgtaacccacgaggtttccttttcctgcagcagcagagtggtcagatatgacctgtcctgactcacaactcagacactcaaacccccctgcccagtgacacaacgaggggtctctcccaggtcttggcacatggcaacacgaatctctcccctcagcagcgaggtggtagctatgagcacaggcttcaaagtctgacagctcttgtttaaattctggctctgctacttgctagctgggtggccctgggcaaatgacctttaaagtgcttcagcctccttccaggattgcagtgaggactggatgagataaatgtgtgtaaagcacctagcctggtgcccaggacacactgggttctaagtaaggaatggtggctttcattattaatattaccatcatcaacactgactgtcattaagtaggtccagctatgacagaataatccctgtccaagcaactgaaatgaatgtcttccaccttctataaggcagatcctccagcctgtgctccactgaagggacgtgatcagagcaagatagagcccaattcctttgcacctctcctcacctcatttcttactgcttagattagaaagcagattcagcataaacacctttctaagcataagggtcacatttgggcttaggttccatctagctagcagtcatctaaacaaagctgaatctcagtgtacctaactgctgtgatgggacggaggtgactcaactactgtacccctttgtggtaggaaagctgtcacagaaagccctgggtgggtcaaagcagagatgcccactgtggttcataaggaatggtactccatatttcaaaccaaatcacatcaaatggccctcaaggtgctttcggtcaagttgggaagacagcaagtacaaccttctattgttaactaagtgccaaatgactgggatagtcctggggaagtcagagaagaaagggtacagtggctagagagatcagagagcttcacagagacagtgggaggatggaagctgggctctgacattagagaggtaggggaaagaatttcaggtagaagatgttggaaggagcaattcagctggtgtatgggcaggtatggggagctcctgggtctggctgggatggcaactttctttatgcaggagagaggctaagacaaggctgagaaggtaatttgggtctggagcagggcttctcagcctaggtactagtgacatctgggaccagataatcctctgctgtggggctgtcctgtcactgtggcctgttctctagcatccctggtctctactcctccagcttgacaatcaaaaatgtctccagaattgtcatatgtgttccagggggcaaattcaccccagctgagaaccactggtccagagtctagagtcaaccaccagtttactctgtcagcaatgcagagtcaagaagaaagatgtgtctgcatatctgggcactgtgcacttctgacatctgaagttctctggcattggctccctgtattttgccctcagtaagtgcagggaacttctgatcttgaggacagagtataataaatcaaatgtattcccttgcgtgtgtgcccacattgagctttattaaccactgttctgtctacacacacgcacacacacactctcacgaggtgttcttacattttatacaatatgaattattcattagctatatgcaaatgaagatttaatggtaaaagtctcatatttagataatttacaaaatgttaaacaagactggttttaaaattattccctgggggaattccactgtttatacttccccatcaagaaataggcctctgaaaacagtatggtggttcctcaaaaagattaaaaacagaattaccatatggcccagcaattccacttttggatatacactcaaaagaactgaaagtaaagacttgaagagaatgtgtacacccatgttcatagcagtattattcacaacagccaaaaggtggaagcagcccaagtgtccatgaacagacgactggatcaacaaaatgtgccatagaaatacaacagaatattattcagccttaaaaaggaaaagaattctttttttttttttcatctgaattgagatgctgtaaaagggaagggaattctgagacacaatgtaacacggatgaaccttgaagatactataagtgaaacaacccacacacaaaaggatgaggactgtgtgattccactcctgtgaggtacccagagtagtcaaattcagagacagaaactggaacgggggctgccatgaggcagggggaagaggacagtggtggctattgtttaatgtgtacagaggtgctgttttgcaagatgaagagctctggagacggatggtggtggcgactgcacaacaatgtggatatacttaatgccacagaactgtaagcttaaaaatggtgaagacaggaaactatatgttacatattttaccacaatttaacaaaaaaggagagaaatagtcctctatacctgcactttcagtatttattccttttatttagccaatccctgtgtgggtagaaagtagtacttgttgagtatctattatgaaccaagtactttatgtaacttaccttaattttacaacattcatctaaggtaggtaatataatcttcactttattattattattactattattatttgaggctgagtctcactctgtcacccaggctggagtacagtggtgtgaacttggctcactgcaacctccgcctcctgggttcaagcgattctcccaactcagcctcctgagtagctgggattacaggcacccgccaccatgcccagctaatttttatatttttagtagagtcggggtttcctcatgttggccaggctggtctggaactcctgacctcagatgatccccctgccttggcctcccaaagtgctgagattacaggcgtgagccaccacgcctggcctgacttcactttatatatgaagaaattgatacattttatatatgaggaaaaggcaataaaatgatcccaatgtcatgtatattagcagcagaatggtgctgattccggagctcatgttctaccctttatatcatacttcctcagaatcccaaactatgtcttccactctattcatccctgacccctagtccacatgaaatcatttaagacttgtctttggtgtgtcaatatcttgtattaattcttccatgctttatctccaaggcctagaacaacgctcagagtaggcatgctaaatgaatgaaaggctttccatatatctaagtagcatattccttgggctttagggacttcgaagatagacaacagtgtggtggtgggggctttctggagaaggtatagtaaaaggcctaacacatgatgtcgtggagactagtggctggttaacagaaaaagtcagttaaaacttcttatttaacactgcatcataaagtcagcattttcaaatgctgttcaaaatatgttccaaatgcaaaaagaagaaataaaaatgcaaactccatttttgttataactacaggatatccaaaattccaaacccccaaacaggtgaaaaagctgtcaaaagcagggagctcaggcagggactcctttgcttcacagaagaaaaagaagaaaggatgctacagggagaggacagggaagctggtgatctcagaaagatctgcaaaaatatgtacttcctgtgggtaaaggacacactccagcaccaaattaattccttgtttttggaaggcaggaacttccttggacctgaagttgaggctaaatgagaaatcacgcaagctacatttgcctcacagaggtggtgtctgtggtagtagagaagacatcctttgcattgtggagatgctaagagacgccttgcctatctcgattggctggctagagactaagggtaaacggactcacccagaaccctaaatcaagggaacaactgtagctagcccagaac

SEQ ID NO: 54 - DNA, 97417 bp, Homo sapiens
tcgtaaagaacatctttccagccaggcgcggtggctcacgcctataatcccagcattttgggaggcaaggggggcggatcacctgaggtctggagttcaagaccagcctggccacatggtgaaacccatctccacaaaaatacaaaatttagccgggcataatggtgggtgcctgtaatcccaactacttgggaggctgaggcggaagaatcagttgaaccagggaggcggaggttgcagtgagccaagattgtgccactgcactccagcctgggcgaaaggaggagactctgtcaaaaaaaaaaaaaaatatatatatatatatatattttttttccctagttaaaataatcctaattaggtagggagctcctactaaggcatgtgtaaatactaaagattaggagacaaaatgtgaatatttaaaatgctgatgttcttctgaagttcctacatgaatatatagagccgactaatgacaaccaggtaaaaaaaaaaactttttaaagcaaacttgttaagagcccatttaagcaaatcaattaactgaatcccttttccatactgcacaacattaaagggtatgtgataatgaatctgaccacatcactggatccactatgagaagcaaacttagctttttaagttttaaaatattttccattaggctaattcattaattataattaaacctacaaccaaaataaatagaaaactagcccactggaaaacctttactccagcatcaagacctaggggatttctttttttttgagacggagatttgctgttgtagcctaggctgaagtgcaatggcacgatctcggctcactgcagcctccgcctcccagattcaagtgattctcctgcctcagcctcccacgagtagttggcattacaggcacctgccacgacgctcgactaattttatatttttttttagtagagacagggtttcaccatgttggccaagctggtcttgaactcctgacctcatgtaatccgcccgccttggcctcccaaagtgctgggattacaggtgtgagccacctcacctggcctaggggatttctcaaaaggctcacaaaaactttttcacaattaggggcccattaatctttgatattgaccttaaaatattttgttaagacatttttacagtgtttgcgtactacatcatacacacattctaaattatgaaagaaaaggattatgtaagcaacttccaaaatttccagatacttagtttattccatcaaaattcaggtggttgatttaaaacctaactctgaagccaattctggatctcagactacctgcacgggaatcctagtggaccagttcaagcagagttcatatagctacatgctttgcaatgctatgggccaaataatttccatgaagctgttttaactccttttaatggttttcaaataatattgttgatctacagaaaattaaccccaggatttcagtgtccaatagagcaaactcttattgatttgtaaggataacacatttctggaatgcggaattttctcttgccaattttacaaattctagtcaagaaacctttgggactaggtatctttgtgaattcagaattctccagattttgaaccataatgtagtacacatactttacatatgttatgtaatattcttcaggagaatgagtcagcaccctgcaaccacaatatttctgaagcaaaatttaggaatattaacactaaatgggataagtaaagacaaaaatagcctcaaatcagcacagatccaggtcaagttttttttgtttttttttttttttcccaaatcagttaaggtcacatcaaggaagctataaaaaaatttttttaaagactttttggatttcagaattctatgaaaaagggattgtggacctgtagctttatagcaaagcatcaaatactagacatgcaaaatgagaagattacatgtgaatatttaaagaagttatatttgtttgacataatatgcattgtacccgggcataataaagttaaaagccagttattctgactgccagaacctgcagaataaattatctttagcttctatctgctcccattccctcctacccacaaagagggagacactatagactttctgaatcctacattattaatctaaagactacttttccctgattttgcagaatcattcagctcactgacaatagtctctcaagtttctaagaggaaacaccagtagaaatattaactataatgcaaggtaacttttctttaaagcaagagacacgaattaaaagaaggattatcttttattacggtcttcctcaaaagacgaagcttgttcttaaatttctgccttagaatggattcacaactatgatgttaactttaacagattgcaccacccaaaaaggttttatatctccaagtcaacttgggagaaaaacatcaggtatgttgcaaatagaacagatggactaacaaaaattaggcaactgacttagtattgaaacagcaatgaccctgcttctctttaatgtgcacacaagccacctggatatagactctgattcaggtttgggtgaggctgagattctgtatttctgttctaggtgaggatgctaatgcaattcgtccgaagactacactgcataaccaaggacagtaatacactcaaaaaaagaaattatgccagtttaacacaaaaagaactgttccagtccaacattatgttatagctgggattcacatttgctcaaatttacacaggtaggagaaagccagtataggaaaccctctagccaacattctaagtcaaaggtttcaagaaatcttactatttaaactgtgtttccttctctttagccttaaaaacctgagtctaaaattctaatttgtattaacatcaaatgtttgcttagagcaaacacttttatcgaatagggatctgtttaacaagatcagattaaagaaacactaaaactgataccctcagctttcctgaaaacttacctctaagtctctgaccaaacttaaaaacacttaaattttaataacaaaatctgaatttccgtaacaataagtctatataccacaaaatttttaaatgaacccacacaaatctagtagcccaaattcagtttactgtggaattacattttgcacaggggctcaattctaaagtaaaattcacacatagaaaaccaagtatagtcaaaaactatccttgaaaatctgttaaatatctatattttaataccatacatatattttaataccatatacatatttagatacatatataaattgagatatatatatgtatctctatctatctctatcatctttcagcaagtcctctaaaaacaatcagttagttgttcctaccagctgagtagcaaaaatcatttcactaagttaaatggttgaatgatgtgataaactataccttatttcccaaaagccctcttcaacgtatattttctaagttatgcatacaagatagttttaaatgatccagtcattggtaaacaatgcacacaactaaatcagtcaagtctgtaaccagtaactgtcttatctctatttcagaaatttaaaagtcactgcactttaagaggtaaatgcaatttcaaattctgaaaaatactaagcaaggcagcactcttccttcgattttaaagacctcctccccaccaacaaatgtgcaaatacttacatggacaagttgggagatggaacccccctatcatcagctaggttcccaaggtggctcagcgttgaagtcgaactgctctctatacagcacttctcctaggccctctgggtagttgtatacttggtcagaaagttcgccctaaaagaaggaaataaaagtagcagaagatagtcctatgttaaaaaaatgtttaggctgacttaaacatgaactgtagaatacgtgttcattttataacaatgtttcattaaagtcacattacacaagtgatattttcaaagggtttaccacagtaccaagtactttatgcagtaaacatttccaagctgctataaaaaattcacagaacttgatgtcatagccatcttaccaagtcgttttatctgcctactcaagagttaccagccttcatttttgaagatgaaaacttcatttttgcttttatttgtcctctaaaattccacatttttaagtggtccagaatttaaaaaattccaagtaccctcaccaacctagtgtatatacaagactttatatgaataatgtactagcatgacccaatagtttggaaccacccagaacactcttttactcctcaaatatttgtcttttacattttaaatgtaaaaatccaccacaataccaaaagattttatgacttagctaatgcattatatatgtatctaacataacttttgaaaaacataaaataacttgagaacttccttataatattaagcaactaatctcttaagatttatcttctcatatctaacctatttggacataattcattctattatcaccaggaacaaataaatgtgataagtgcacagcacactatacaacatggtaggtgagttttagacattgttaccactcatcacttctaagctaaaatgatatacctatgtttctatgtataattcagtggttactgttttcaagtaaaataatctgacagtgtttgctagaaaggggtggtaagaaggaagccagaaaaccagaaattataaagtcaagagttggagggatttcagaagcactgtaggcatacctaaagtgtatctcaccaggatcaaggcactcctggtggaggcaaaatgtttcatctatctaggagaagctgatcacatgctcaatgaatgacatttatggatgatgaggaaagaactcctacaaacatgcaatgatgataataatcttacattagattccaaataatgtactactccataacattctgattctttcaacaccaacgtaattttctaaataaataaaaagttgagtcatgctggggacagatcattctcaattatcctaaggaataggatcagataccctaggtaagacattattcatctttttctcaatacatatatccacagctattttgctgcttaatgcaacccaagagcaatgatgtgaaacattatggacattaaacgtcagacattccagaatgttcctcagtgagaaccctacaacatttccatttaacaaaaagatactagtagggaatgaaggctctagaatttgaaaggcattatttaaatacaaaaaatagggctaggcgcagtggctctgagccagtggatcacttgaggccaggagttcaagatcagtctggtcaacacagtgaaatcccatcttctactaaaaatacaaaaatcagctgggcatggcggtgcacacctgtaatcccagctactcaggagcctgaggcacaagaattgcttgaactcaagaggcggaggttgcagtgagccgagattgtgccactgtactccagcccaggcaacagagggagaacctgtctccaaaaaaagaaaagaaaagaaaaaatgagccagatgtgacagtatgcacctatagtctcaactactgaggaggttaaggcaggaggactgcttgagcccaggaatttgagtccagcctgggcaacacagcaagacccaaaaggtgcataggataagcacttcttataaacacatacaggatagataagcacttcttataagcacttacatacaggatagatagaatgtttatccggacagttaggataaaaaagcatgaagaaggacttgttaaatggaaatgcggagaaaaggcagtatggaaaaaaataaattattttcacttagaatggtgtatgtaaacactgcaaattctctaacaccttagagaatagcacagagagggctcggttggtcagtaagaaacaagaagcattttatgtaatttattttattttatttttttgagacggagtctcgctctgtcacccaggctggagtgcagtggcgcgatcttggctcactgcaacctctgcctctcagattcaagcaattctcctgcctcagccttccgagtagctcggattacaggcatgtgccaccatgcccggctaatttttttgtatttttagtagagatggggtttcatcatattggccaggctggtctcgaactcctgaccttgcgatccacccacctcgacctcccaaagtgctgggattacaggcatgagccaccacgcctggcctattttattttcttaaaaataaaataggaattcaagctggccttgaattcctgagctcaagtgatccgcctgcatcagccttccgaagtgctgggattacaggtgcaaaccaccgtgcccaactacaaaaactttctatcactttgacagtaactattacaaacttagtatctcaaaattatcagtacgtctctgaaaacacaatgcctttaccaatgatttttaaaatcgttctgtggtattctttgtaaaaactccaaaccccagtctaatcatgagaaaaacatcaggtaaaccccaagtttaggggaggggagtattctaccagatatctggcagcacttttctagactgtgatggtaatgaaaaacaaaggaagactgagaaactgtcacaaaccaaagaaaactgggaagacatgacaactaaatacaatgtggtaacttggattctggaacagaaaaagacattaaagaaaaattggcgaaatccaaataaaagtctcgaacgtttcatagtgccaaagtcagtttcttagttttaacaaatgtactgtaataacgtaagatgttactaataactgggtgggaagtatgaagaaactgtatctttgtgactttgctgcgcaactaagatactccaaaataaagtttatttttcattattattattattttttgagatgaagtcccgctgctcttgtcccccaggctggagtgccctggtgagatctcggctcactgcaacctctgcctccccagttcaagcgattctcctgactcagcctcccgaggagctgggattacaggagccagccaccacgcccggctaatttttgtatttttagtagagatggagtttcagcatgttagccaggctggtctcctgacctcaggcaatccacccgcctcagcctcccaaagtgctgggattacaggcttgagccaccgcgcccggcctaataaagtttatttttaaaaaaaacaaccaagggacagtcacctaatgggctactactcagcaacacaaataatctactgataatctacagataaagacaacagggatgaatattaaaaatgtgctgagttaaaagaagccttttataccaaagaatgcatactgtatgattccattcatgtggaaagtctggaatagacgaaaataatctatgggtttaaaaaaaaaaatcaagatcagccgggcgcagtggctcacgcttgtaatcccagcactctgggaggccgagatgggcggatcatgaggtcaggagttccagaccagcctgaccaacagtgaaaccccttttctactaaaaatacaaaaattagctgggcgtggtgggcgcctgtaatcccagctgctcgggaggctgaggaaggagaatcgcttgaacctgggaagcggaggttgcagtaagccgagattgtgccactgcactccagcctgggcgacagagctagactccaaaaaaaaaaaaccaagatcgtggttggctctgtggtgactggaagacgatttgaaaggacaagaaaaaacttttgagggtgatggcgatgttctacatcttgacaaaaggtttaggttacacagctgtatttttgtcaacgttcatcaaattgcatacttaagacttgtgggtttatactgatgtgaattttaccctctaagatttaaaaaatagtaagcggtactgagctctatttaatatgcacatactaaagttggaggggtctccaactttactttgaaatgcatcgacaaataaggtaaaatgttaattacagaatctaggtggaagtataactctttttcaccttctgtttgaaaacgtatgtgataaaaccttgggggagaaaggcactgactactcgacctcacttatcaccaccgataatcattttcttttggagtctttcctaaactccttggggcttatttctaatcatgatcagcatctgcacgctctcgtatatgtaaaagaaattaatgaattatgagggcctttctagacaatcatgagccatgtttctgccaacccttgctgtatttgatgtgctttgatgtacttctactttgtgctttgatgcacctctacatcaaccttcgctgagcacaaggcaattccccctcctttgagtccttagattcccacccagtctgggaattcacgatagaaacacgacgggacacagaactaatataaccaagatgccaccacaaaattcagttaaatgtgctgaaacatgaggcggtaaactgtgtccccgactgtttcgggtttctgaaccagcagctttgtctacgaaacacacattcaggataccgtgtaagggttagaacatgttaccaccaccaactgttggcagtcaagacagtagttgataagccacccgtctaccaatctccctctttctgcctaggaaccatggcgcggacggaaaaacgaagccatggtgactaatcctcaggctccaggaggtgactggggtgagtgaaggcgacttgacccaatcaggagcgccgcaggggcggagcagcagcctcgaggcttccagaaggggccaaaagcctctcgctggctacctgacaccggggcttccccgccgccaggccccaagtggcgtcaactttcctccaccagagggggaccgcgctccccgcgccccccaggaatccgacttcctccgcagctgtcaccagaggccggcgcggggcccgccccgctccattcataaccaggaccccagccgttgcagcccacagcgccgcccgcccgccgggcttcgggaggcaaaggtggcggcggcgcaccgcggagtaggggctgcgggaccccggcccctcagggctgcggccgggccccctccccggaaacagcaatgcaccacgggagaggggtgggggccgcacgccgccaggaggggacggcgacccccggcggcgagacccccgcgcgctcccccactggcacacgccccctcgccccaactgctgcggctccggctccgccaagcgtccagcagccgcccgaaggtcctgaggcgcggcccgccgcccagccccgccgccgccgccgccgccgggggcacagacagccgccgccgccatgttcgaggcggccggccgcggggcgctgcggggacgtcttaagggcggcggggcccagccggagccccccagccgccccccaaggccagccccgcgtcctggcccctcccgcgctcctcggctcggtactcacgtgagataacggcccaaagagtcgggtaaagcgtcttctctttttcggcggaatttttaaagagggatgtggttaccttgagcagaaatacccaaggcggcctgggccataggctgcgggaacgacttgggggtaaaagcgcggcaccgacaccagctgtgtgcagcagtggcggcggcggccgaaggagaaatagaacagcgcaggcaaaagaagaaaggcgcgggctgggtgggaagaggattcggactcgtcacactgcagagcagcagagcgagaaaggatgagaagaggcagagaaggcgacggcagaagaaaaaaggaaaaactgcggccgcgatcagagcctgaaagtgtgagaaggcggcgccagcgacgccagtatttatattagggggcgtggcctggtgacatcacagctggccgggcagccgcgcgagcggggcggaacccggttgcagcccggagaaaagggagggggacggaagaggaaggaggactgagcccgggagagagaggggaggggtcggcgcgcgaccgggtcatgcaggtgcagactggccggtcgcttcccgccctccagccacccgcagctccccggcaggcgaagggcggccgcgcgggtgtgggccgagagagggaggcggctcggctggagcgcgccgtccgcccgacccccgccgcctctcgggcgcctgcgctcacgctgcggggcccagcgcattgtgagccgggtcgagctccacgctggcagcgtctgagagctgtcctgggccggaggtggcgcgaaccctgtgcggcctagagtgggcctggggtaagcctgtcggcgccgctgccgagccttcgcgtccagctccctccgctttgtgaggcctgtagtttaccctggggagtgtcctcccgggctgaggcgcccgccctcggtgatgcggtactcctttagggaagcgagttcctcgtggccagaaaggaccggcccagtgtccgggtgttaaaaagggttgtgaccacgtgaaaatgtcctcagtgctcgaacgttgcaatacggtgcagtggaaattttttaaaggaatatggcttttatgtcttcatttttaaaaggattggtggagtcagtcccaagcaggacccgcgttggagaggggattactgatgttacaagcgcacattacttcaatcccctaggtctcattttcgcggtcgttttaatttttctactccacaacagacttttttttactaggggttctaagattacctacatagcttttaatttattttcatcttttttagatgcctcagcactaatgatcatgatcagagaccccgagttctctcgtgctgctacgcttcgcaacacatagcacaaatggaatatgtgttgacacacccctctgaagttaagatctttgatattaagaccctgacttttttccctttcattcttccgaaccctctgtgtactttgagcagcactgtggttgattaataaatcatcaaatgtgaaaggaagaaagcgaccttcctgtgtggaaaagcagggtatcttgcgaggctgtatgagagagtattcggtagaatcaggagctgtggacgcattcctgattttgtttttccttattttgctcggctatatcttggctctgtcttttatttcttcaaagttctgttctattcagaacatttgaaaacacagccattcactagaccctctctggtggaggaagaaaaactagagatgaatacaatatttgaaaccttgcttacaatctagcaggggaaataagacagcaatacaaaataaattgttggctgatacaaataaaatgctgcaaggaccaagtggagggaagagatgattgcagctaagtgagagaaaggctgctggggaaaggtaaagagtgattttgagaaaagcctttctagacaaaggtgcttcctttttcaccaaactcgcctgtttggtgattttgagagtagatgttccagtgttccaggcaagggaaacggatgagagaaggcacagaagtgggtgggtttagagaattgtgaatagcctttctggttccagcataggggcatggttgcaaatgagattgaaacggtagattagggtgacatcaagaagacattggaggctgggcgcagtggcttacacctgtattcccagcactttgggaggccgaggagggcggattacctgaggtcgggaattcgagaccagcctgaccaacatggagaaaacccggctctactaaaactacaaaattagctgggcatggtggcacatggctgtaatccagctactcaggaagctgaggcaggagaatctctagaacctgggaggcggaagttgcagtgagccgagatcacaccattgcactctccagtctgggcaacaagagtgaaactgcgtctcaaaaaaaaaaaaaaaaacaaaacaaaaaattggaacttggactttattctggaaccatataaacaggaacatgatatgctcaaaaatatgttttttaaaagattactccagcaccagtgggtgggattgaaaagaggtagaaagtttggaagtgaaggaaactcttacagcagttttctggggtcttttggtttacttatttatttattttagtactaagggggccgggcgtggttgctcacttggtggcctagtgatggtgtggtggcctagcactttgggaggctgaggcggacggatcacttgaggccagtagtttgaaaccagtctgcccaacatagcaaaaccctgtctctgctaaaactacaaaaattagccaggcgtgctggtacacgcatgtagtcccagctacttgggaggcggtggcaggagaattgcttgaacccgggaggcagaggttgcagtgagctgagatcgcaccactgcactccagcctgtgcaacagagatgtactttgtctcaaataataataataataatgaaagtactaaggggattcagaatggatgggagggaaaacgcacagagagagtagagataatcttgactttcaaaggagatgagaaggtgtcaagtgatttggggatattaagcttatcaacagggagaattctggagccataaacagagatagaaatagaaggaccctgccaggagcagtggctcacgcctgtaatcccagcactttgggaggctgaggcaggcgggtcacgaagtcaagagatcaagaccaccctggccaacatgacgaaaccccgtctctactaaaaatacaaaaattagctgggcatggtggcatgtgccctgtagtcccagctacttgggaggctgaggcaggagaatggcatgaacctgggaggcgtagcttgcagtgagccgagatggtgccactgcactccagcctgggcgacagagcgagactccatctcaaaaaaaaaaaaaaaaaaaaaagagggagtaagatgaggctaggtttttttgccttttgtgtgtgtatgtgacagtgtgtcacactgttgctcaggctgaagtggagaggcatagtctcgtctcactgcaacctccacctcctgggaccaagtgatcatcccacctcagcctctgagtagctggaactactggtgcaccaccatgcctggctaattttttgtgaagacaggtcttgcgatgttgcccaggttggttttgacctcctggactcaagtgatccacatacttaggcctcgcaaaatgctgggattataggcatgagccatcacaccaggcctgaggctgctctgatacagagttttagctgttgaagaaatagccaggtaaaaatggtccagaggcctctgaaaatggggagatctagaaccctttgggtgtgaatttgggagcctttcctacagacatgataattaaggaattattgaggtatagaagaaaagagtataagcacaggatctagagaatgccagagataaaagacagccgcagagaagaccaagaggccgaagaaaatgacaatagtgcaatgctatgctattcaaggaagagggtgcttatcgcaaaacgggatgagtgatcagggttgtcatatcctcaaacaggttggaaaggggattctgataaaagtttgggtttatcaatgctataggaactatatgccataggaccctaactcttatttaaatcaatttgtctctggcaaaattggttttgttatatggttaatggtttgacttaaagttacagtttccaagaacctatggatgacatcaaatgaggatgtactgtattaagtactattgtatattgtagattatggcattgtagcattatagtatattattgcagtcttaacagttgggagtataatgtgttttagttccctgccagcccacagaattattcagatgaaccaataaaattttgttttgaaattcaaggcacatctcactttcttttttttttttttctcctaaaagactctcgctctgtttcccaggctggagtgcagtggcatgattatagctcactgcaacctccacctcctgggctcaagcgattctctcacttcagcctctcgaatagctgggatgacgggtgtgcaccaccatgcctaattttttttttaaattttttgtagacatggggtttcaccatgttgtcagagctaatctcgaactcctgggctcaagcgatcctcccacctcaacctcccaaagtgttgggattacaggtgtgagccaccacaccaagcgtatctcaccttcttgatactacaaaaccttcctcagtcccctgtttgttctctttgctcccaagtgcaatccctgtgtgggcctgcatagcttacactactttcctcttcttgtctgagggaatgtgtaactaataaactgttgttgatctttaaagaaaaaaaaagtttgggtttatattccaaaggcgttggaaaaggcttcaatcatggaaatgatttgtattttagaaaaggtgagaaagtggggctggaaaggtaaaatactcttaagtttttggcaggcagaacatacgtgaagccattgtagtcattcatggagaatagcaagggcctggaaagaattttatctgtaacctttaacagagtaatatcagcagagtaggagaaacaggaagttgtaaagggttgagtgaggggcacttgcagtcagtgaatgttgacctctctttaagtagatgatactggactagagcctaagccaacatcatttgcaccatgaagcaactcaacaacatttattatgaaaagtatgtgcccacacaattagtatttttgtattcagatttaaagaataatgctagctttacatgaatacaatagtgctttgaaaactataccacagtaggccgggcacggtggctcatgcctgtaatcccagcactttgggaggccgaggtgttcaagaccagcctgaccaacatggagaaaccccgtccctactaaaaatacaaaattagctgggcatggtggtcatgcctgtaatgccagctactcaggaggctgaggcaggagaatcacttgaacctgggaggcggaagttgcagtgagctgagattgcgccattgcgttccagcctaggcaacaagagtgatactccatctcaaaaaacaaaaaaacaaaaagaaaactgtactacattggaatagacaacatagtgtaactttaatggaaggatagctatctaatgagaatggcatatttaactgtgtttggggttttagttattttgccaagtcaggttactcatacacaaatatgcaggtagtgccagcaaaaatattatcattaaatagagccctaagataaaataatataatactgttcctacttaaatcacctaggtccattgattcaaacttatatgcttttgtgccaatagatatgaaagattgaatgaattagatgattgataagggtaagtcactcaacataaataggtaaggctgggcatgataggtcatgcctgtagtctcagcactttggaaggctgaggtggggggatcccttgagcctaataattcaagaccagcctgggcaacatggtgaaatgctgtttgtacaaaaaatacaaaaattagccaggcatggtggcatgtgcctgtagtcctagcttcttgggaggctgaggcaggagaatcacttgagcccagtaggtcgaggctgctgggatcgtgccactgcactccagcctcggtgacagagcaagactcagtctcaaaaaaaaaaaaaaggtaaacaaaatcatcaccctataatagaaatctcatgtaaccacatatataaaagttaagagtttattggtaattgagagtaaaaatcccagtttaatggatgctatagtttgaatgtgtaccccaaaatgcctctgttggaaacttaatccccagtgcaatgttgttgggaggtggggcctcatgaaaggtaattaggtcatgagggtggagttaatagattaatgccagagggggttccttataagagggggagttcaatcctcttactctctttctctctgttgtcctttctttgctcttctactatgggatgacccagcaagaaggccgtcagcagatgctggcctcttgatcttggacttcccagccttcagaacgatgagccaataaatttctgtgcattataaattagctagtctgtggtattctgttacatcagcacaaaatggactaagacaataggaatgtttaaagatagcttcctataaatttttattgctaaggtaaattcctggaatactccttatcctgtagaaaaccaacatatatagatgttgaatagtaaaaacattcacattttaaaacatgatattttagccatccactacatcttttttgtgctccaataacctttctaaaaagccaactcacttaccaataatctaatgctatggtatttatggactagcaaaaatgtttcaaattacattgctgggtacagagtttagattatatactattctctcttttaactaaatagatgtaaaaagcctaacagatgctcctttatttgctgagtatctgttactaaaatcctgaccgggtgcagtggctcacacctgtaatcctagcactttgggaggccaaggtgggtgggtcacttgaggccaggagttcaagagcagcctggccaacatggtgaaacctcatctctactaaaaacatgcacaccaaaaaaagtcaaaaattggctgtagtcccagctacccgggaggctgaggcacgagaatcacttgaaacccagaggcagaggttgcagtgagccgagactgtaccactgcactccagcctgggcaacacagtgagactctgtcaaaaaaaaaaaaaaaaaaaacacacacaaatccttggagtcattttttgttttccttttaaaaattattttggaggcacagtcttgtacctcagcctcctgagtagctgggattagaggcatgtgccaccatgcctggttaatttttgtatttttatagagatggggtttcaccatgttggccaggctggtctcaaactcttgacctcaagtgatctgctcgccttggcctcccaaagtgttgaaattacaggcatagccactgcaccaggctagagttgtaatttctttacctggcttggctttcacctcagatgagaaatcattttatttaatataattgttatgtttaattcttttcacaaaatgtagcacttaggtcagtagggttctgtgccgttccagtctagagatgccctgcatcctagcactggctcatattcatcacctatatctttgttcacaggataatttaacctatggaatggtgtgcatgacaaacaaagggtgatagagtccagattaaaattcacatgtaagggaaaagaaaaacatttttcctattttgatttcagtggctgtgtatgccagtagatgggggtcagcattttccctcatctgagtgacttggaaggtttctgcaataaacaagtcataagcatacactgacgtcttttattacttccagaaacaacaaattactcactgttaatttaagagggctgctttagaaacctctgtaagaggccaaaggaataatccagttttacaagttaaatgtaacttaggtgatgtgtagggaaaactctatgatttctctctactctgacaccacaacaacaatcaacaacacgagaagacttctgtaaccaaacgtggttttttttttccccatgcaccaagcagtggacaccagctgggtgtcctctaattcaattctgacactatctacctgaagatactgtcagaacccacaggttgagggctcagtccccaagactgcccaccccgcaactccagtcattaagtccaggcctcctgaacttctgacctacaggcttcaagttggggttcccatgacctcctctttgggttcgattaatttgctagcacggctcacagaactctgggaaacacatacctgtgtttactggtttattataaaggatattgcgaaggatacagatgaagagacacatagggcaagatacagggggagggatgtgaaacctccatgccctccctgggcccgccactctccaggaacctccatgtgttcagctatctggaagctctgtgaacccagttcccttgggtttttatggaggcttcctgacatcagcattccttcccccagggtacagggcagattctttctgggaaaagtcttaaaacccacaatcagaaagatagaagattagagtcctgccttggggcaggtgaaaggagggcaggagaaggtcagaggcttgctcctgaggcttaacacacctcacattataacaaaagactgtaacaagggctgtaggagttatgagccaggaactgtggataaaaaccaatgtatatcataacaccacagattattagaataaacaatggacagatccatgagcttgctttggaagttagtaaatccttgtaaaattaatttcattttcactttgctaccaggcattttccgatgacaaatatattgtttattgcataatatattgtaagataggtttgtatctctctatctcaaaatagcgacctggcagctagcctaacatttttggttaagggcttagaaaatgggagctctgagattgagtcttgttgggtttgaattgcggtttactttatattctttcataatgtagcctggatgctatcacatgagcttattcttcttcctaaatgttaataatggtaactgcaggctacattttcttgaatgagacttttaagattactgtgtcatttaatttgatattttgcacgttttcttaacctttttatcgatataaatttgccttctctgattgtaactggaaggagaaaagtccatgcaataaagacaataagatattagttctttatcaaaatagggagaagagaaacataaacaactttctttcacaaaaataatctttttgtatctgactcaaaaagattatcaggcgaggcttggtggctcacgcctataatcccagcactgtgggaggccaagacgggcagatcacttgaggtcaggagttcaagaccagcctggccaatatggtgaaactccgtctttaccaagaaaatacaaaaaaaattagctgggcgttgtggtgtgcacctgtaatcccagttacttgggaggctgaggcatgagaattgcttgaacccaggaggtggaggttgcagtgagctgagatcgtgccattgcactctggcctggttgacaaggtgagatcttgtctcaaaaaaaaaaaagattatccagtcacctatgataatagcagttaaaagacttcagtcagtcctagctctgcttggctaagtgacttaactgtaaaccatctccatttgtttcagaaaatgtattttctgttcttttggaagtacttttccctttctattccctgagttctgttgtgagctgtcatcataacctgggcctccctggctaagtaattggtacaagggcttacaacttcttgcccaatcttgggagttagtgcagctcaataatgattggcacatgtttgattcagaccgttctctccctgggatttttctattaataaatggttgcaggaaggaagacttgaagagggaatcatttcttttccgtctcaagttatgacaatatgagtcaagagctgccagtaactggggttccaggagaaacctatgtgagaagatgaagccaccatttgtcatcataaggggtgggtcagcattccagttgtcccatttttcttgctcttcagttatacaaataaagaaaatttaggccgggtgcggtggcttacgcctgtaatcctagcactttgggaggccaaggcgggtggatcacaaggtcaggagatcgagaccatcctggctaacacagtgaaaccccatctgtactaaaaatacaaaaaattaggtgtggtgatgggcacctgtagtcccagctactcaggaggctgaggcaggagaatggcgtgaacctgggaggcggagcttgcagtgaaccgagatcgcgccagcctgggtgacagagtgagactctgtctcaaaaaaaaaaaaaaaagaaaattttcattcttatctaaggtaggtccggctagctttctgtcacttgcaaccaaaagtccaggcttatacaagagacagaaacaaaaagatatttaggttaaaaaaatcagttgcacaagtacaagacaggagaggcctgcctgattattcacagtttacatagtacctagaaatgttagttaaccacaagcctgccatgaaccaacgaaggcacagaattgcttaaaacagaacaaaacctgagtgcaatttggattgcaatagtaaaagtataggtcagaagggaggtagcagtttggtttactatgtttggtcagatcctggctgtagcttttctgttttggggaaaagttgtattgttgtaaagttctagatagcacattgtacaggagaatgaaaactagatggtatggaggaggatagccataaaagtgaggagatttaggagaaaaatgtattactagtaatgataaaaattctagagaaaggttggtgaaaaataacaagggaaatggaaaaaagtagaagcaaaagccaccatctttaaacaccaaataccaggcactatactcatgcactttattttgttattaaatccttcagtaagcttctcaggtagataggtcttactatgcccattttacaaatgagaaaacagaagtacagtgaagttatgtaatttgttcaaggtcacctggctagacagagagggtccacatttatatccaaacatgtctaatctaatacctaaagccaaactctttagctatactacctctttggataactttcactgaataatatgtcaagctctgacaggtaaatgaaataaattagcgtcagtacatgaggatcagtggttccctctgccagacaggctatcttgtttctccctctgagtttccatgaggtttggtttgtgcctttctaatgccctttgaatttcttgtctgatgttgttgtattattgtctgaactctgtgaacaagatattaagtttctttagggcaaaaactttggtgttttttgttttctgttttttttaatctcacagaacactcaatacagtgccttgtgcacagacttctagtgtcttcctaaccatggggtaactgacaatggaatgggatttctcatggagcagaaagctattatatcactggatttgttcagagatacagagggaatatctgcattggatgttggaccagaggaactccttagacactttacttccatagccccagtgttcattacatattacatttttcaaaatgaaattagctttaactttaaatatgatgattgcatattaacataaagaagttgtatttctttataatctttgtaattataaagaaatatatataattatatataattgtaattctttataattataaagaaatatatataattatatataattgtaattctttataattctttgcttacccatactaaaattagggtactttttatttatttatttatttatttttaaagacggagtttcgctcttgtcgtccaggctggagtgcagtggcacgatctcggctccccgcaacctccgcctcctgggttcaagcgattctcctgcctcagcctcccaagtagctgggactacaggtgtgcgccactatgcccagctaatttttgtatttttagtagagacagggtttcaccatcttggccaggctggtctcgaactcctgacctcgtgatccacccacctcggcctcccaaagtgctgggattacaggtgtgagccaccacacctggcaaaattaggaaactttttaatcagtgttggccatattattgatttctcctcccaagagaaatcagcaacgtacaataggaaaaaaaatgcctatggctgggcacagtggctcacacctgtaatcccagcactttgggaggccaaggcgtgcagatcatttgaggccaggagttcaagaccagcctggccaacatggtgaaaccctgtctctacttaaaaaatacaaaaatttccaggcgtggtggctcacgcctgtaatcccagcactttgggaggccaaggcaggcaaatcacctgaggtcaggagttcgggatcagcctggccaacatggtgaaacctcatcgctacaaaatacaaaaaaattagctgggcgtggcagtgtgtgcctgtagtcccagctactcgggaggctgaggcaggagagtcacttgaacctgggaggcagaggttgcagtgagccgagatcctgccactgcactccatcctgagtgacagagtgagactccatctgaaaaaaaagaaaaaagaaaaaatgcccatgtcgactgggcacgatggctcatgcctgtaatcttagcactttggcagatggatagcttgagctcaggagttcaagaccagcctgggaaatatgacgaaaccctgtctctaccaaaaatacaaaaattagctgggcgtggtgcagtacgcctgtggtcccagctacttgggaggctgagatgggaggatcgcttgagcccaggagatcaaggctgcaatgagctataatcatgccactgcactccagcctgggagacatagtgagaccctgtctcaaaaataaataaataaataaataaataaataaataaataaataaaataaaaatttttaaaaaagcctgtgcctaatttgaaagaaatttataaattttaagtttttagtcagggaagtggaaatgaactgtcgtaaaatgggaggttttatatttatttttgttcctagttactaagacaagaatgctattcaaagaaagtgaatgaatagaaaatgggagacactataatagtataacatcaagaatgcttaaaaaaacagtctcagaattgttctttgtacacaaaaacaatggtgcttaacaatatattggttcctaaatcaaatttccagctgccagcagccacccttgagtgggaggtgatttagtgcgagcaagttggttgcagcatgcctcctgcttcccaggcaccgaacccactggtagcagagctagaggactgttgagcacttggatccaacatcctactgctcatagtgccataaaaccatgaactaaaccttttaattattagagaacaatgatccgtaaggcaaaatcggtgttcttccagatggtattacttggggcctccactgctgcttgctcctgccctctggttgcttagatcttggggagcctcgttagatggggcaaagcctgcatgatctgacagcctcagtgagcagaccagaatcgcaggggagaatatgggacaacatgttctacaatgatggccttactattaggagagaagcccttgggaaacctacttcatgttctgtcatttttgccatttcgggaaactgccaaacctgcttatttgaagttcatccatattctttttcatcccaagcacccagaataccaaatcaaaatgtgaggaaagcaggatggtactagaatgtgggggcaaatatgggggccttcaaagctcatataattaatcaaatcgacaataaaaaatacaactagaatttcagctttatcataatggacatgaaaatgggagaatatagcctttgtgtttttcctagatgcattctaaattgtactgttaaagaaatttctgaacttttacatacaagtttttagttggtcattgtgctcataaaaatacttttagaaaacaagtgaaacttaggagtgctaatttagtaaaatggctgtcaagatctggcagactgccttacatcatggctcatgcctgtaatcccagctttttgggaggccgaggtttgcttgcttaagcccaggaattcaagaccagcttggatgacatagtgagacctccatctccacaaaaaataaaaaattagctgggcatgttggcacacctgtagtcccagctactcgggaggctgaagtaggaggatcaatcaagcccgggaggttgagactgcagtgagttgtgattgcactgctgccctccagcctgggtgacagtgagaccttctttcaaagaaaaaaaaaaaaaaaagatctggtagactgagttagattattaggatttctaaagatatatttgaaatcaaatgataaaatcctatgagttgctcaatattttacattttaataagattggagatttttcaaattataaaatattttcttcatgtctgtgatattttcactcagccttaaaatcagtacaaaagaactctcatccaaattaaaatcactggataaccttaaactttcccgtcttgtctcctgataacctcctgtttattctttaaaaatcagtataagcctaattttcctctatggaaattttaatgaatttttcctgtaggtaaagttatttttgccttccttgatgcccaaattctatctgtcctagctcaatggattcaatatttattgaattacccagcatgtgtgaaccaattacaaaattgaagacatgggtattgctatagtttgaatgtccccttcaaaactcatgctgaaacttaaccttccatgtggcagtattgagaggtagggactttaagaggattaataaattcattgattaatggattaatggcttcatggattaataggttatcatgggagagaaactaatggttttataacaaaaggaaaacagacctagctagcatgtgagcacactcacccccttcaccatgtgatgccctgcaccacctcaggacactgcagagtccccaccagcagcaagaaggctctcaccagattcggcccctcaaccatagacttcccagcctccaaaactgtgagaactaaatttcatttcttaaaaattatccagtttcaggccaggggtggtgggtcactcctataatcccaacactttgggaggctaaggcaggaggattgcttgaggccaggaggagttagaaaccagcctagtcaacatagcgaggctctgtctctacaaaacaaaaattaaattattttttaatttttaaaaatgttaaagtagcttggatgtggtggtgtgcacctgtggtcccagctactcaggagactgaggcagaggattacttgagcccaggagtttgaggctgcagtgagctgttattgtgccactgcactccagcctgggtgacagagcaaggccctatctctaaataaataaataacgaaccaacccaatttcagatattctgttataagcaacaaaaaatagactaagatatctaagaatataactgttagatactgtggcaggcagcctctaacatggtccccaatgatcccaccttttggtgtgtaatctcttctccttgaatatgggctggatttactgacttgtttctaatgaaaaaaatttggcaaaggtgatgggatgtcacttttgggattaggttataaaacaactagggctttttcttgagcatcttctctctgtctctctctctctctctgaaggaagccagctgccatgttctgagtactctctggaagggcctgcatggcaaggaactgatgtttccagccagcagccagcaagaactgcaagccttgtgaatgagcttggaagcagatcctcccctcactcaagccatgatatgacaacagcctgagacccagaggtcagtaaattgtcaagtttgtatatctagcaaatagcagagccaaaattcctgtcactcaaactcaagatttcctcatctataaaatgtagttgttccacatggccagatgcaaagtgtcatttagctataagagtctaatgaatctaggtcccaaattaagttcatcattgtcccctccttccccctacacccatcctcttctttcaggctccctgcccatgttttttttgtttgtttctttttttttcgcctgcccatgttcttgattaactgtcaaatcagtcaggctcaaacttttgaaaattttaacgccctctttttttctcccttctcatgtataaaatgagttctgcacgtttttttcttgaaattatctttttcttcttctccctagttcaagcttctaccatatcatgtgtggatagttgcaaaaccgacagagtgtccagtttttcctggcccaatccactttgtgtggatacttctcatactaatcttctttaaatgctattttcatcgatgcctccaaaaaccataatgagcccctgtttcttataaattatgtcccactcctctcttggcttagctctccaaaagccagcaccacccctgggagccagctttctaatccccaacacaaacctcctgcttcagtctatctggcttgctcttgggcccttgagttatccatgctggtgtctgcctctgaaactttgtattgtctttggattgttattttattgtttacccaaattctgccatccatagcatcccagctaaatccaacatcctgctcagatcccaagaggcttcactattgctaaagttgatatcacagatctttctagacccttaggggctgctattccccattaaacttccctattctctttccatacaagtacctaaaatgtaagtgtccccactcatccatcttatcctgtacactggtccccagacccccttgtgcctccccaaactcattccctcactgcttcattcctcctcatacctttctgctgtactctccggaacccccattttatggagagcaaaccatcctacatccccagcctgtctcccactccttgccttaacagaaacttggctatcttacaagaacatagcttcccctgctgctgtcttgaattgaggggtgtttactttaccagtcctcatatactgcggggttgggagcagggttggccttctcccagcttcacagtgctactgctacgccattgctctgaaaataaataagagattaagccagctggcatgcccgccccccatccgtccatgcctgtatcatctaacaccttcctgacactcctacgatgattttttttaaaggcacctggtttataatctttctctcctagattaaagatcttaaattacagctttaaaacaatatttttttattattctttctccttaaaaatatactataatacgccatgctggatggctcacacctgtaatcccagtgcacgggggggctgaggcaggagattcttgaggctaggagtttgagaccagcctagacaacatagcaagacctcatatctacaaaaaataaatactaaaaaaattagccgtgcatgatggcatatgcctgcagtcccagctatgaaagaggctgaggggggaggattgcttgaacccagttggaggctgtagtgagttatgatcgcacctgtaaatagccactgcacttcagcctggacaacagagtgaaactgtatccttgaaaaaaaaaactactataataaaatccctctataatcttatctatctgcaccctactccagtgatgaccaccatgcacagcttggtgtgcgtgcttctgaaactgcagtctcgaatctactttagaggtcattgtctttgtggattacctttaaagcaccctacccttcctgcacttttatctgctcaactccagggaccttcacctgcccccaactattctgtattagagggcttaaactccaaccttcctccctctaactacaacctcctttcccttctagttgcctcatgctgtccccatacctgcttttaaggtataatcacccaatcttttctttttaattgagctgaagttcacataacatacaattaaccattttaaagtacacacttcagtggcatttagtgcattccaagtgctgtgtaaatactagccagtctgcagattcaatgcaatccctatgaaaatcccaatttttttttttttttgcagaaatagaaaaacccatcctaaaatttatatgaaatctcaagggcccctgaatagccaaaacaactgatgtagaacaaagttggaggggttcacactttctgatttcaagacttactacaaatctacagtagtcaaaacaatatggtactagtgtgaggacatatagaccaatggaatagaatagagagcccagaaataaaccctcacatatatggtcaattgattttcaagaaggatgccaagaccattcaatgggaaaaggacaatctttgtaacaaatggtgctgggaaaactgcatatccatatgcaaaagaatgaagttggattcttaccttacatcatatatacaaattaactcaaaatggatcaaacatctaaaggtaagacctactcttagaagaaaatgcaggagaaaatatgacattggatttggcatatttgtttgatgtgataccaaagacaaaggtaacaaaagaaaaaaccaacagtggaccccatgaaaactaaaaacttttgtgtgccgaaagacactatcaatagggtaaaaaggcaacctacataatgggaggaaatatctgcaaatcatatatctgataagggatatgtttgggatatttccagaatatataaattactttttaaaacaaaaatatactatttttgtgaggtaaaagataattaaaatttagaggtttactctctctatatatatatgtatttgtatatgtgtgtatgtgagtatacaaatagaccccaacttatgatggtttgacttacaatttttcaactttatgatgggcttattagggtagtaaatgcatttttgacttagactattttccatttacaatgggtttattgggatgtaatcccatcataagtggagcatcatttgttttatagaatatatatgttgaggaagacatatataagttagtataataagcatcatgagattagtggccacatctggcatatgtaacattttttcccacagtgccttgtaacacaatcttgacccacagtaagttttcaatattttttaaaattaaatgaatgaatgacagagaaagaatattctgtttaatccctacattactaccagcattatttttctaaaattcagatctgtttgtgctgttccttgtttagaaatattgtgtgacctcacaatgcctttagaatctggtatgaactccttagatggtgggcagaccttccctccatctgttctcatgctcagcccccacatggtacagtagaaaagtggcttcagctttcatgtaccttggtcaaataggggcaatagacactacctcaaggattgttgaaaggattaaatgaggccgggcatagtagttcacgcctgtaatcccagctctttgggaggcagaggtgggcagatcacttgagctcaggagtttgagaccagcttggccaacatggtgaaacccgatgtcaactaaaaatacataaattacccgggtgtggtggcacgagcttgtaatcccagctactcgggaggctgcgacaggagaatcgcttgaacccaggaggtggtggttggaggttgcagtgagccaagatggcaccactgcattccagcctgggtgacagagtgagacttggtctcaaaaaaaaaaaaaaaaaagacgaagaagcagccaggcacggtggctcatgcctgtaatcccagcactttgggaggccaaggagggagatcacctgaggtcaggagttcgagaccagtctggccaacatggtaaaaccccatctctactaaaaatacaaaaaattagccgagtgtggtggtgggcacctgtagtcccagctactcaggagactgaggcaggagaatcacttgaacctgggaggcggaggttgcagtgagccgagattgcgccactgtactccagcttgggcaataagagtgaaactccatctcaaaaaaaaaaaaaaagattaaatgaggtgtcacctgaaaatttccagtgtatagttgtgatgagtcaattaacgtgtttccttttcaccctcctgcatgctgctcttcagcacactatactcttcacactttcagagtgtacatgtaatttcacttctccatattttgttcatgctttccccactgctttgtgtgtgtcttccccatcttccacctctctataaaaattaaatgaaagcttcaagacaagtctcaaattgcacttagtaaaagctttctgactcccccaggagggcttaattctttttttatgctttcatgtaattttataagacaatttctaagaaactttcatagactatcttatattacagttatttgtggacacaacttgtggacatgtatcttaagagcccaacacaatattagttaaactgagttgatttttttgaccaggaaatttggatcttaaatctcataactgaaatatatcatgaaatcatccaaagcatgctctctctatacatagttcctctctttatgtgataacacccagcctggcagtatagcacccttgccacccacagctctctggaaggtacagctgtacaagataacatgaggtaatgtgacttctggggataggtggtggtggggaagcccatcactgcttagaccagcgtcgaacatgcctgacccaggtggagtaaattatttgctcagaaatgacttgtgtggtccaggttctctcagaggagccaggctagttcatgaagaagaagtttagtgtgtattgccagttgattgtgagtactggagctcagtggtcttccttgtctagatccagaaagagcagccatgttgtgcctcacacaggatgaaggagccgaggaagacagacagaatgtgggagaggctggagctggctgagaagcaaagacaagggggacacagagggacaagccaccctgtccctgagaattccccagttttctggccaatttgggtgaaacccagcaactctttgtgttccatccgtcgatactgtgaggtctctctatacactcagtaaatgctcctttttacctcactggactaatgctttttagagtcacatgcatgctgacttcaacaaagcaaattgtttatctgaatcaactctgccgtgtaccatgtccagtcacttgaatttctatttcatctttgactctccatttgctaattatgactttgggcaaatcttttgttcactctgtgtatttgtccattttcacattgctgtaaagatactgttgagactggtatctttataaactggtaatttataaacaaaagacgtttaattgactcacagttctgcatggctggagaggcctcaggaaacttacaatcatcttggaaggaaaaggggaagcagggcgcatcttacatggcagcaggcaagaagaagagaaaggggtaagtgccagatacttatcaaacaagcccatctcatgagaactcactatcacgagaacagcagggggaactgccctcatgatccagtcacctcccactaggaccctaccttgacatgtggggattacaatttggattgcaattcaacatgagatttgtgtggggacacagagccaaaccatatcactctgtgtctcagtttctttagtaggtaaaatgcaataatttcatatggtgctttatcaatttccatacattatctcatgtgaatttttaaaaagttcttatgatacaggctaagaatttttccccatgttttacaaacaaaggaactttcccaagatctcacaattaagtcctagtgaaatgggactcaaacaccagtctctgacttctatctactcaggtggtcatcaactctacctcagagaatataaatttttttttaatggtaagtctttgcagattgattaagatccccttgagaatttttggtaaaagactttgaagtcataagaggtaacagtgacttcatattatatttgtatgagtcctgtttcaaaatatattgataatgtggctgggtgtggtagctcatgactgtaatccagcactttgggaggccgaggtgggtggatcacctgaggtcaggagttcaagaccagcctggccaacatggcgaaaccccatctctactaaaaatacaaaaattagccaggcatggtggcacatgcctgtaaccccagctacttgggaggctgaggcaggagaatcgcttgaacccagaaggcagaggttgcagtgagctgagatcatgccattgcactccagcctgggcaacaaagtgagactccatctcaagatagatagatagatagatagatagatagatagatagatagataatgaattctatgataggaccactagagtggagatctgtagttctaataaagtactttatttctaaaaatatgcataatacttgcctgtgtcatgggcttcatgaagaattccagttactatctgaaagtttaattgcaaggtttggagctcaagatgttacttatcctcatgggcagtacctgttacttccccactgtaaaatatgctagctcaggtcacaaggaactttgagtgctaggatagtaccccacggtccagttccccagaacttcttcccagtgtctccacagccactcacacagcctgagcaggtcttgccactggcagctctcttcccctacttcctccaggccaggggttggcctgattctgcttagagcctgcatgcggctccctcagagccttggggtggccaatctttgctgcttcccagaaccaccttgtactcttccatgcagagccctgttgagtcaccatgccttcctccagctgctgccacagaccacatggcttctttctcaattaactctgaaagagaaaagtacgttatgcaaaccaggtgggagcacaagagcgcaacccccttcctccccaacacagagaagcacactggggctccttgtgtaatttagaggttaactaacacatcatgttgcaattgtgcctatgtgaaaaagaaatggaaggaggaaccaggtttggagctgattctctgctgcaagggcttaccctcagtctgacctgtgcagtaagactgagagaagcactaagggtatggctggaaaagatcataatattaaaactattttactataatgatgatagctaccattgtagtgatatgcaataatattagtaacactgaagtctttactatatgccatcctgtgtgttaaatcttttatgtatgttgtgtatataatacatgtaaagccttgttgttgttgtttttgagacatagtctcactctgtcgcccgggctggaatgcagtggcgtgatctcagctcgctgcaacctctacctcccaggttcaagcaattctcctgcctcagcctcccgagtagctgggactacaggcgcctgccaccacgcccagctaatttttttgtattttagtagagacagggtttcaatgtgttggccaggctggtcttgaactcctgagctcaggcaatctgcctgcctcggcctcccaaagtgctagaattacagatgtgagccaccgcacatagcccatgtaaagcctttaacatagtgcctggcacaaagtaagtgctcaataaaagataatcatagcattattattttgtttatcttcacagccatcctgaattatttgacaagcctttgctcttcagtcagtcgttcctttagggaatgtttattgagcctgtactatttacccagcactatatatatatatatatatatatatatatatatatttttttttttttttttttttttgagacagagttttgcttttgttgcccaggctggagtgcaatggctcgatctcggctcactgcaacctctgtctcctgggttcaagcaattctgcagccccagcttctcaagtagctgggattacaggcgcctgccaccacgcctggctaattttgtatttttagtagagatggggtttcaccatgttggtcaggctggtcttgaactcctgaccacaggtgatccgcctgcctcagtctcccgaagtcctgggattacagacatgagccactccacccagccttccgagcactatattaggcgctggggatacttagaagagtgaatgccctttcggacatgggttccaatctggcttaaccactatctttctgggtaactttgagcatgcttcttaagctttctgagcctgagtttattcaactgttaaatatgtacaataatttctatgtcataagattgttgataggactggaaacacatgcaaagggcttagcccagctcagtgttcatacaaggagaagctcctcagccaggcctgctggctcacgtctgtaatcccaacactttgggaggctgaggcaggtgaatcaattgaactcgagagttcgagaccaacctgggtaacatggcaaaaccctatctctacaaaaaatacaaaaattagctgggtgtggtagtgcctgcctatagtcccagctactcaggagggggaggctaaggtgggaggatttcttgagcctccgaggtggaggttgcagtgagccaagattgtgccactgcactccagcctaggcaacagaatgagcccctgtctcaaaaaaaaaaaaaaaaaaaaattcaagccgggtgcggtggttcatgcctgtaattccagcactttgggaggccgaggcgggcggatcaggaggtcaggagatcgagaccatcctggctaacacggtgaaaccccgtctctactaaaaatacaaaaaattaaccgggcatggtggtgggcgcctgtagtcccaactgctggggaggctgaggcagaagaatggcatgaacctgggaggtggagcttgcagtgagtcgagatcgcatcactgcactccagtctgggcaacagagcaagactccgtctcaaaaaaaaaaattatttactatagaacttgtatatgtattcttgaaaaagaattcaaagggagaacctcttcccagggtcacagagtgatcagtgccacagcttggacttggagccttagcttatctgccatcttcctactgcatcaaagcagagattgccacgtgattgcccagtgtgattgaaagtttgaagtccgtatttctctgaaaactttggtgtatctagattctgtatgtctcttggacagatgaagagctgctgtacacagaagggagatttttttttttaattgaggaatctaactcaagaataaattcaaggccaggtgcagtggctcacgcctgtaatcccagcactttgggaggccggggtggaaggatcacctgaggtcagtagttcgagaccagcctgaccaacgtggtgaaaccctgtctctactaaaaatacaaaaatgagctgggggtggtggcgtgtgcctgtagttccagctactcaggagactgaggcacaggaatcacttgaacctgggaggtggagattgcagtgagttgagatcataccactgcactccagcctgggtaacagagcaagactccatctcaaaaaaaaaggaaaagaaatttggatcctttagaaatcttcagacacttggcataacatgaagttaaaacaacaccccacttagttccatgatatttctgatgaataagaaatatgacaccacagagtgaaaccaatatttttaaaaacctcctgaagagactttttttctttgttgattaccatccagagacaacatttgtttgaaactttgaacagaatcagtttgtagggatgaaaccctcattcttccccgcctgggcccagactttccatatcttgtactctgagaaccttaaagtcttgaaatgatttgcagtcccagcgaagaagctaaaatcaaaactgatttggggaaaaaccgtttactttctgacctctttgtactcttcagagaatttttgtatgcttgtttattttcttaatgtctcttggtaatgttttttcctgttttggtttcatatatgaaatgttccatctgtgtattcattttctggatttattccctagaattttaagtaagagtgtttctcaaactttttttttactccaacccacaataagaaatatattttgcatgttaacctaaatacacatatatttacatatatatctaaaacaagtttcatgaaataatactcttgcaatgaggtatgcactatggttttttaaaattctattccactttatatatacaaaagttgggacagaggttcaggagcagggaagggatgaataggcagaacacagggcacttttagggcagtgatagatgcatgacattatacatttatcaaaccccacagaactgtacaacaaaagagtgaatcctcatgtaaactgtggactttttattattattttttaagacagggtctcactctgtcacccaggctggagtatagtggcacaatcttggctcactgcaacctccacctcctggattcaagtgattcttgtgcctcagcctcctgagtagctgggattacaggtgcacgctaccatgccaggctaatttttatatttttagtagagacagggtttcaccatgttacccaggctgatctcaaactcttggcttcaactgatctgcctgcctcggcctcccaaagtgctgggattataggtgtgagccacccaccatgcacggccaaactatggactttggttaatgctagtgtatcaatattagttcattaattgtatcaaatatactttctgtgcaatttttgtgttaacctaaaattgttctagagcatattataaatatttgtaaaagtaaaacacgaagttggatttagcctactaaaattgactttactatccattaatgacttgctttccatggtttgaaaacttgtggccgtggcctggtggggagtaccctgggtttctcttaggttggtgcaaaagtaattgcggttttgccattaaatggcaattacttttgcaccaacctaataactacatcccagcctctgtcactctatagagcctgcccttcaacaagccacataataatgtctctcagctttctcatctgaaaaatagagtgtttgatcagatgaatgccaaggtcctttccagatccaaaatattatacctgtaagtataaattctcattttaaaatgtcttagagtaaaagaaaagtcatgaagcatgaattgtaaattatgtgcatgttatttaggcatgttttatgttttataggcatcaaatgggtacttttcatcttatttaaaataagtaaaatgaaaagtaattgttctccagcaaaatatataaattacatttctctctgagttcctgattcaagatctctgtagaagaagaataacaaagaacacctaggaatgatacaaatgatactttcaattttggcacttgtctgccctactgccatgtcctcatgagagtatccctgaactcagttctcgttggtcatttgacgtttgctgggagcgtactatgggcgaggtcttatgctgagggtgagcctagtggtgtctcacttcttgtagcttgggtcaggaaatggagatcagctactgtatcccagaaccttcttgccttcccagtcccaaggcaggtgctgtgggaagagtgtgtataaggtctgatggggacagacctggggtgaatctcagtggcacttctcaacagctatagatccctaagtaagttatctaatcatcatccccacagtgttctcagatgaaaatggggggtaataccccatctcataggagtttaaaaggattaaatagggaatgtagctatcatcttgtgcctggaattctgcaaagcatatgaaggtgcccttggaacttccttcccatttttcatatttgctctgccacctctacacccagccccgctttctgcaaccaattgtattataaccccctcccaaacacttagtgcatcctcccactcatgtaatttgtttaccttgttttctatttatttcttttgagatggggtctctgtcagccaggctggagtgctgttgcatgatctcaggtcactgcaacctctgcttcttgggctcaagtgatcctcttgcctcagcctcctgagtagctgggaccataggcacacaccatcatgcccagctaattttttgcatttttgttagaaacggtttcaccaggtttcccaggcttgtcttgaactcctgagtcaagtgattcgtgtgcctcagcttcccaaagtgctgggattacagatgtaagccaccgtgcttggccttaccttattttctaagaactgatgaccataagtaagttttggcacacaccactttgtatgcttcgtctctcatcccacatgtccgtggagataaacctcattgacatggaacctcagaggcagcttgcagaaggaataatacatcacaacaagatggcaacactctttaagagctgcatttccagtcctctggctttgtttcagtggggctgcttttaggttgattgaataactagcagcaacgatagcacctaaattattagttaatgaaagtctgtaatttgctaggcatgtgctaaccagtttacataaatcatctgaaagcctcacaataactttgaaaggctaggttttccctttcacagatgaagaagttgaatatttgatttatttattcattaaggaagagatttttaaataaaaataatttttttgtagagatggggattccctatgttccccagactggtctcgaactcctgggctcaagctatcctcctgcctcagccgccaaaaatgctgagattacaggtgtgagccaccatgcccaactaaggaacaaattttaatgggtgcttcttatgtgaaaaacatgggattagacactggggatagaaaaccgaatgacacatagtccttgctgttaggaaatatatggtctgttgggaaatctggcagatccacagacaattacaatcctgaggtaaaccttgggaagggttagaaaatacagaagatgggctgggtgcagtggctcacacctgtaatcctagcactttgagaggccaaggcaggcatattgcctgagctcaggagttcaaaaccagcctaggcaacacggtgaaaccctgtctctactaaaatacaaaaaattagccaggcgtggcagtgtgcacctgtagtcccagctactcaggaggctgaggcaggagaatcgcttgaaccctgaaggtggaggttgcagtgagccaagataacgccactgcattccagcctggatggcagagcaagactccatctccaaaaaaaaaaaaaaaaaaaaaccacggaatatgacacctgaccagactgaggtttgcataggaggtgaggatagaagctgtattagtccattttcacactactatgaagaaatacctgagactgggtaatttataaaggaaagaggtttaattgactcacagttctgcattgctagggaggcctcaggaaacttacaatcatggtagaaggcaaaagagaagcaggcaccttcttcacagggcagcaggacagggagtgcaagccagggaaatgccagacgtttataaaaccatcagatctcatgagactcactatcacgagaacagcgtgggggaaactgcccctatggtccaattacctccacctggtcccacccttgacacgtggggattatgggtattgggattacaattcaagataagattttgggtgtagacacagccaaaccaaatcagaagcctcaggtcttttcttaaacctagttaatctgaagtctgtcccctaccttccccaacccccacaccagattaacaaacctagagcaattcctccaaatctccataagtactttcctgccctcagttaactaagctagtaaataccaatgcccaaggaccatgtgaatcttaacaggaccctcccacagacaacatgtactgaagctgggaggaccatatagtttatcacaaaaatgaagacacttttgagactgaaaggggccctattaacaattattccaggataacaggtataaactaggtatgtcctagcaacctgggacacaggtttaggttaagtataacctaaaggaaggcctgtaacgaaaagactcaggctgaatgctaaccagtggggaaaacactgggggcagtagttccttgatgtccctcaatcctctccactaagcagtgacatgggcttaaatctggggcctactttccctaagctcagggaagcactgcctgacagtggatgtgggggtgggggatggttgctctagcaacaatcacagaggtccctttggaattgttaccagggtgaactcaccagccaggggaataccccagaaagagctgccagtaggaggagggccagcctcactggtgattggagtccagcagtcccactgattgggagtgctgagccaagcccatgtcgtgcttcgctgatgcatggctgggctgaagaaagagctctttgaatttttcatagaaaagactggtgcccaaaaggccagggctcgagaatgaggctgcctcaagcacagtgcttggcaggacaccagggctgaaaggtacagcaaagtcctcccagaatcgcttgtcagagcagggatttgcatcacagactggccactgcaaagacagatgggaactcacaggttttgtgtgtgtgtttgtggttcactgctgatggacgcatgtcagaagccacctgagccttggcccagccttcatgtggagtgaaaacccagacctgtgtgagcagcaggtacttgaagcaagagaagcaaggccgagcctccagggctttgtcagaggctccttccttcctggaatccaattgtacaaccaggagccagaggtcttggtggccggatgtgggtctaatcctggttccatggcctcccaactgagtgaatgagattataatgataaaatataatttactgtgtacccggcactgccctaagcactttgtgtttcttatctcatttactcttcacagaaactcttggtactattactatacttgatttctagagaagaaaactgcggcacaggatagagttggtttgccaaggtcaggacatacacctcactgtgtgaggttagaaactgagcactggacccccatcctacgctgcctgtttcatgaattgtaaaaggggggataaatgtagcacctcctccctaggttgttgtgatattcaagtgggataatccatttacagcatgggcatggtggctgcatgtgaaacagtgggagctactgtcagtttgattagttctggcctctctgcagccttgctactctctgtttattctcagcagccttcagacaattttcttttcttttctctttcttttcttttctttttttttttttttttttggagacgggagcctcattctgtcacccaggctggagtgcagtggcgcaatcccggttcaccgcaacctctgcttccctgttcaagcagttctcttgcctcagcttcctgagtagctgggattacaggtgcatgtgccaccacacctggctaatttttgtatttttagtagagactgggtttcaccatgttggccaggctggtctcgaacttctgacctcaagtgatccaccctcatggcctcccaaagtgctgggattataggcgtgagccaccacgtgcagcctattaagacaattttctgtttgaacttcacaggactttcagcttcttgggttgggacacattgtctatttgttgcgtgtgtggagaacagtggacagcaaagatcaaaacccttaggggagaggggcaagagagaggatatgagtggggattctctgctcccctgaacagtattccaggattccttcaccaattgaagttcaagtttggtcctctgagcaaaaagtttagagaagttcctttatgcgtttatttaaatttagaataaacatctctgtagcaataacaacaaagtgaacactcccggttttgttcttttcttattttttttgttttgtggctctcatgcacacatggaaaaacaacacaaaacaaaaccagatgaactgaaaccgtttctctatccaaggctcccatatgtaagaaaaggaaagattttttccttcttgggcagggttagatggtgttggtcggggggagttgggagggaatggttccaccatcctgttccaaagctccaattcccctccagtaccaaagctgagttatccaagagaagccccagggaaatttgctccctgtataccaaggggattcgtgaatctctcctcaaggtagagatcatcaaggatgtgcccagccactccatggagagaagctgctgctgctcacaaagaacattgcatggtggatttccaacttggaacttacatgtggggaggctctgggactccttcctttattccttttccagtcctattagtctcagatgcatgtttcctggtcactgagggagctgcaggcccaaggaccatatctgcttacacttacccacagtgtttcacttgctctagcctgaatgtcagcattccaggaccactgagggagggacagagcagagagggctgggtcaagtgggcagcttccaggaacaccccgggagacctgtgggtagctgggctgcactagagtctgggcacagcagctcttccgaactgcagacccactccctccctttagtattgtcctgtctctgtaggcttgaggattaaaggcatgaaaagagttcacaagccagtggcttaagacttctcttgatgttcccagacagctctgttcagaggcattagctgtcagagggaatattctgcaagatttgaagctgtggcatggtttgctcgtccaaccttctttactcccatatttggcctttgcagttgacaagtagagctggtttgccttcctccaaaaatgtccatggagaggagcaaagaagacctaggaacaatgaagggaaagggaaataaaaaaggggaaagccaataccaaagaaacgggttaggaaattttccaaggaaggttgatctgaatgaaaaaaaaatcacaagttttctttttagagcagataatgtatctccgtgtgtgtatatattacagcctcacttagaaatgccacagggggctgggtgcggtggctcactcctgtaatcccagtacttcgggaggctgaggagggtggatcaactgaggtcaggagatccagaccaacctggcctacctggtgaaaccccgtctctactaagaatacaaaaattagccaggcgtggtggtgtgtgcctgtagtctcagctactcgggaggctgaggcaggagaatcacttgaacccaagaggtggaagttgcagtgagctgagatcgcaccattgcgctcaaccctgggcgacacatcaactttcataaagccaggcaggtggaacttaacacttcctggtgaaaaggactttgtgggtgaggttcttggacagctgtcccagggaactcctgggagaaagatctggttcacccgagactggtggaaagcaacctgtgctaaaaacttgctttcagccaagaaagccaggatttggctaagagataagcgtgggcacgtttgacccttttgtgtctttcatttgatattaacatagctagacaagagggagaagggtgacctcaaagtgataaggtctgtttcctttagaactagaggacccaaagatctctttgttttgtttctgcctggaagacaagtagagctcattccagttctgtaaaaggtcaccaaataccctgcagtcttgttgtagtaactgtttctgtgaacttgcttcaaaggaagcaaacatactatttaatactgaccaaagacacctggggttgttttctgcttcttgttgtttgttgttttattttgcaagagcagataatgatcagtttagagtctggtttccctggtgccaaaaacaaaccctagtacctcctgtttctggctcaactgtccccagccgtctcaagtgatccagttggaacgcggagaacagagaacaactgacttccccttcccctgggtggtgcgttagagttctttcccagatgacacacagtatctgagactctgccatggaggaatccactctgtggggaccttctcctttccagtccccaacccgaatttcttcacaaagtagcaataattagttcctagggcacatggtgctttgcagtctgcacagctgaaatggctagtcacaagatggtttgtaattttaaatatacctgtgccccacccagatttcaacacattaggaattattccactcctacaacctggtgactgggaggaaggagagaagaggggtcaggattcaaaagagcagctgcagggctcagatctgctgtcccctgcctgctaataatagctcccattttagccagcgctcactctgccaggtatgtgctaagcacttctttgttgcctctgatccccgagacagctctggaagatgcaggtgattcctattttgattatggggaaactaaggctttgagagatggaggaatttgcctaaactcgcaaagccagtaaaaactggaagcgggtctgaacttccttctggttctcaagcactgcgcttttcattctcacactgtactgctgcttcaagctgatgaatttagcaagagtgggtaccaggaaatgccagtgagacaggaagggaacaactgccaaaatgccaaaccaaaaggggtttgaaacctgagagttggcagttcaccactgcaaaaccacggggctgcgtggaggtattcatgggacaccgagtggtatcactagcagcggactctgcatgcttacttagagcataaaaggatagcacccttggccattgcctgacatgaactcagtttggaaattgcagaggtgtggagagccatggatgggttttataatttattctaatgtaatctctgtgctaaaggctgtttgaaaaaaataatgaagttgatgttgcttaagttatatgcaaatgtaaactggtcttccttcaagatgtttggaatggaatgaatgcccttcccctgggtacctcccaatacctaccctcaaaagagctccagtaaggcttccttatctttccttgccctgcttcctacactgctgctgcaggtgtctctgggtgattgtgggggaaaccactgtggttaagcaccaacaccaagacatggcaccaagctatcttctccctcaccgtacagccaggcgggctgcttggtggatttggggtcaccctctccgtctgtctctccctgatagttacatttctcttccatcactgtgtgtttggcagtggatgaacctagagcattacatacattttttaaaatttatttttttctgttactgatctgaatgggtagatgaaaattacatacatttttaagagagcacttactatatgccaggcattgttctaagtcctgtacacatcttaactcttatcctcataaaatggcacaaagtgggtagcactattatctccatcttatagatgataaaaattggggcccacagaaattaagtaacttgcgcatgttacgcagctgatgagtaggaatctgggctgcttaatcctttgcttctcttccatagtggttctagcgtgagtcagagtgttcattcagacatctcttcctgggcatgctagccccatccatggttgggttgctgctgctataactggctcttggtggcaacactgaaattatatcaggttcccaggtgagcgtgttgctattttaggtggtcaaggataatatcgcagagtgctgttgatattctccacagggtggctctgaacgaatcatcttcctctgggacaccctcttcacttgctttgtatctgggcactgtgactcagtttctaaggttatcaactacgagtgctagatacatttggtggcgtcattgcctattcgtagaacatgccgtcagccatcctggaaaggcatacagcagaacaccataagaggagcagtatttggggtcactccccaaatgaccctgcaggaacatgccaattccagagcttaagagggaacttggagggagtgaggataataatagctaatgcttattaagcccttacaatatgccatctctgatctaagcacattctgggaactacctcatttaatcctcaccacaaccagctgatgcagatcctattactatcccccattggcagatgaagaaaatgaggcacaaagaggggacctgatttcccacaatcaccaggctcataaacgggatccaggattccaacacagccagcagcttcaaagattgggctcaaacatggtgctacaactggcccctgaacccatgtccttccctgtgctttattttggggagatgaggactttcagctatcttattgccatctcgttttcagccttgaaggagcccttagaaataaagtgaaaagaaaacctggcctgaaacaactgccaaatcccaattagggaacaaggttgggaggagagaggagggggcaggatctgaccaggttgtaattcagtaactgatgtctctaattgatcactgagaggaagaagcaggaatggccttctcagtcagcattcatggtggcaggagaatccaggatctgttccttgaccttcttgttctggaaatgagacttcagccctgttcatcctttggctcccacactacctactggactctccttgccacctgttgctgctgattgctcacccccatttctaagacactgacaggaaggaagggtgtctcccagctggcagcataggtttcattttagcatccgaaaagctgagcatcaccactccgattgctgttaattataacattagtactttattttggatgacgtttaaaaagttatgcaaaggccagacatggccaggcatggtggctcatgcctgtaatctcagcactttgggaggccgaggcaggcagatcacctgaggtcaggagttagataccagcctggccaacatggcgaaacccgtctctactaaaaatacatcccatagctgggtatgctggcacacacctgtaatcccagctacttgggaggctgaggcaggagaattgcttgaacctgggaggcggaggttgcagtgagccaagattatgccactgcactccagcttgggcaacagagtgaggctccatctcaaaaaaacgttatgcaaagatatttgcaaatattatatctgataagggattaatatccataatacataaggaactacaactcaacaacaacaaaaaatcgtattaaaaaatgggcaaagtatcctgcacgtgtaccactgaacttgaagtaaaagttggaaatatttttaaaaagggcaaagtagttgggtgtggtggtgcatgcctgtagtcccagctactcgggaggccaaggtgggaggatcacttgagcccaggaattcaaggttgtagcgatctatgatcatgccattgcactccagcctgggtgacagagtaagaccccatctctgaaaaaaacaatgggcaaataatttgaatagacctttcttcaaagaaggtatacaaatggccaataagcatatgaaaagatgtttaacttcactagtcaccagggaagttcaaatcaaaactacaaaacccattaggatgactgttatcaaaaaatgaaaaataacaagtattggcaaggatgtagagaaatcgaaacccttgtacattgctggtgaaaacgccacctggttacagccactgtgggaaacagtttggctattcttcaaaaaggtaaacagaattaccgtaagattcagcaattccacttctagctatatatccaaaagaattgaaagcaggtattcagaaattgtacatccatgttcatagcaacattattcaaaatagcttaaaggttattgagaaacaacccaaatgtccatcaatagataaatgggttgaccaagtgtgctatacacatagaacagaatattacttggccgtaaacaagaatgaagtcctgatacatgcgacaacatggatgaacattgaaaacatgctcagtgaaataagacggacacagaaacacaagttttgtatgattccacttgtatgagatacctagaataggcacattcataaagagagaaagtagaacggacacccgggaccagagggaaaggagaaatgggaaggtattgtttaatgggcatagagtctgtctgggataatgaacaagttttggaaatggataatggttgcacaacattgtgatgtagttaatgccaatggattgtacactttaaaatggttaaagtggtacattatgaacatttcactatagtttttaaaaatcaacaaaaaattttatgtaaaaagttctgtggggtttaatcttttagcagttcataaatccattaacatttgccacagctaccctacagagaggcatactatgtgaacaccacacttggctttctgagctggaactaaaaacaccattactctactccttggagtttccccagagtgagtctgtccacacgtggttgctattggaccctacctgttgctactgtatcactgtgctgtgttactaaggagtgtgacacgttctgactttcaaagcatttacacagtgaataataccacttttgtgctccttggtataaggccacatcttcaagtacttcagcatttaaaaaaaaaaagtgagcaaaggatttatctggctagagtttaaactccaatcattatttagtcagggacagagccaattgtagtgtttaaacagcattattatttagacagggacagagccaagtttacggaattctggaaggcaagcttaacctcggggtaccttagcagtgttctatgtgctggtcctgagcatttaatccagagcaaactggtgatccatttataacccaagttttctctgtaaactggaaataaaaagatggataaggcataactcctgctgtctgtcatggggttgaaagtctaacagaggcgtagaaataatgcgactagggtacaataagtgttaatcagcacatattcaaagtgtgttgggtgactggggtcagggtccagggcaaggtcacagagatgagatggcatttgagccacatcctgaaggaagaatggagttttccaggatgacaaaacacaaaacgaaggaatatgcatattccttttgcatatgcagaaggaactgcatatgcaaaacctcaaagcatggcaggatgggacacccagaaaaccacaagcagccgtgtgtgggtagagcaaaggcgagtaggagagtggcagatcctgaaaggacatagaaagaactgagattttgtcatagctcaatgggcaacatgggcaactgttgaagggttttaagtgtggaaggggcctggaggggcatgatcaggttttcatttcaaaaaagaaatttaagtctggtggatggatttgaagcttgggacaaggagactagtctgaagattgtcagaggaatccaggtgagaggtgaagaaagcccaggttccagagctatttcagaggcagcagagacaagaattgtaactatttcactagaatgaagttcaaaatgaggtcaccgttcctttcatcttggaattatagcaaggtgaagcccgcagagctgaagggcagctggttcctcctgtacccgcttcttgtggccaagccgcaggagcctcagccttgccatgggaatggggcctgtagctgctttttctctctccttcctcttctctagggcacccttactcagccttcctaaactatttgaagacatggcctttaaatttcctgttgtcttaatttattttttttttgactcagttttatggatacttcaaaaatcaagaaagaataagaagatagtaaagaatgttcctctcagccaccctgcatccatccatttcccaccccaacctgcaaaaggtaaccactggatgggcccggtggctcacacctgtaatcccagcatcttgggaggccaaggtgagcagatcacttgagcccaggagttcaagaccagcctaggtaacatggggaaaccccatctctacaaaaacaccaaaattagctggacgtggtggcgcatgcctgtagtctcagctactcgggaggccgtggtgggcggatctgttactagtctcttatgtatccttccagggatttttgtaaacctatagtcaagcaaatatgattttacgttcttcctttcccccttttatttccattctttcttggggacaggggtccttcttaggataaagttaggaagccccaggggaactcattcagacctaaggagtcagtcctagttgccgttgtctattagtaagcccttttcctctgcaataccttacagtctaagggccccaaacaaaaagccttccagtggggcaaggcctgattgccttaggaggccccacaatggccgaggcctccatctatccctggacctactgaagtaactgaggcacccatgctggcctgcaccagacagtgtgtgtgagacccttgaacacagtggaaatgcaggcatcactgaggcacccagcctcaggctgaggacagagtgcctgtgctgtaattagatgtgactcctccacagccaagagggcctacactctcagtgacgattcttccatgacattcaggcactttccccaggtacagccatggcagaagatggctgggcacaagggaccagctgcacgctgctcctggagtcagctctccaggacaggcctcaaccttgggcctcttcagaagcactgctcctatttcttgccagccgatctcagcccaagccacccaagtctgcacccccctgagtacagtggagatattacattaactttgaaataaaaggagagactctaggtctcactgctcccttccagaagcttcttttgcctcttgcaaacatgggtggctttgggaggagtgccagcacacttcatataccagaagcacctcagccctgaggtcttggggacatagataggttcttcatctcacgtgatggggactgagctctttttggtgggtaaagtggattgaaataaaggaggagggctgacaggaatttgagactagcctgggcaacaaagcaagaccgcatctctacaaaaaataaaataaggttgggtgtggtggctcatgcctgtaatcccaccactttgggaggccaaggcaggaggattgcttgagcccaggagttcaagactagcctgagcaacatggcaataccccatctctacaaaaaatacaaaaattagccgggcatggtggcgcgtgcctgtagtcttagctactcaggagactgaggcaggaggatcacctggacctgggaggtccaggttgcagtgagtaaaagaaaagaaaactgagacccatggaggttaagtaacttacttttaatcactgttacttatttttttctctttttttgagatggagtctcactctgtcgccaggctggaatgcagtggcgcgatctctgctcactgcaacctcagcctcctgggttccagcgattctcctgccttagcttcccaagtagctgggactacaggcgtgcaccaccaaacccagctattttttgtattcttagtagagacggggtttcaccatgttggccagcatggtctcaatctcttgacctcgtgatctgcccgccttggcctcccaaagtgctgggattacaggcatgagccactgtgcccagcccaatcactgttacttttaaggaaatccatttgactactaaggcataatgtcacagtggcttagacaaaataggagtttctctctcatgttagtctcatcatgagcagtccagggctgataagacagctgagtcttgttggggacccaggtttcttctttcttgttgctctgccttctctagggaataccctattccaccttgtcaaagatggagcaatgccacctctgcattccaatggaagaaatgggaggaagtggaagacacaaccttcccttttaagggcataacctggaagttgggctcatatttcaatggccagaatgtggtccaatggccatacccagttgcaaaagaatctgggaaatgtagtctgactggaaggtgactcatacagctaaaattcagggaagaaggcgagaatggataatggaaaacaaataggaatctctgtcacagtcagaagtcgaactgggattcaaacccaacagtttgacttcaaagccagaactcttaaccataatcttcattatgctgttgttttagaagaattaaatgaggtccacagttggtaaggtctttctctacagtttgagacttcattaacacatgtatgcacatacatttttgctaaatggatagattatagctgctcttgccataatattataacgcttactgtgaaagttgttcaacattgatggggaatcaagtaatgtttcctttttttttctttttttgtttttttgccttgagacaggtttttactctatcacctaggctggagtgcagtggtgcaatcttggctcattgcagccttgacctgctgggctcaagggatcctcccaccccagcctcccaagtagttgggactacaggtgtacgccacttgtagtcaaaaaataaaaatcaatttttaaaaactgatttgtagaggcagggtctctcactatgttgcccaggctggtctcaaactcctgggctcaggtgatcctcctgcttcccttcccaaaatgctaagaatacagacataagccactgccttttatcctcttctcatagactttccatttttagtatttttttgtgagtctttcttctttttcttctctttattctcctctccctccttttcatgcctcatactttatgatgcttggtatatgaggccatcatcagttttataatttttttctgcatcggattgtaggattgggcttggaaataactgccccaccaatgaactttctaacctttcacaagcaagtggggcaaaccagggtaacttcttttttttttttttttttttttttttgacacagtctcgccttgttgcccaggctggagtgcagtggtgtgacctcggctcactgcaacccctgcctccagggttcaagcaactctcctgccttagcctcctgagtagctgggattacaggagtgcgctaccatgcctggctaatttttgtatttttagtaagacatggtctctccatgttggccaggctggtcctgaactcctgacctcgtgatctacctctttggcctcccaaagtgctgggattacaggtgtgagccactgtgcccggccagataacctttaagaattcttagaagcccagaaataaagccaaacctatatggtcaactaatttttggcaagagtaacaagaagacacctgggaaaagaacagtatcttcaataaatggtactgagaaaacttgatttccacaggtaaaagaataaaattagactcttacaccacatgcaaaaatcaactcaaaatgcatgcaagacctaagcataagactggaaacaataaaactcctagaaaaaaacacaggagaaaagctccttgacattggccttggcaatgattattttgcatatcatagcaaaagctgaggctacaaaagtaaaaataagtgagactgcatcaaactaaaaagcttctgcacagcaaaggaaacaatcaccacaatgaaaaggcaacctacagattgggaaaaaaatatttgcaaaccatatatctggtaagttgttagtatccaaagcttacaaagaactcatacaactcaataacaagaaaacatataacccaatttttaaaatggacaaaggacctgaatagatatttcttcaaagaagacataaaaatggccaacaggtatataaaaataaaacatcaaaaccactatgaaatgtcacctcacatccatggatagctattatcaaaaagacaaaagataactgttggccagagtgtagagacaagggaacccttatgtgctgttggtgggagtgtagtttggtgcagccattatggagaacaatatggaggttcccaaagaaattaaaaatagaaccaccgtaggatccagcaatctcagtttatacccaaaggaaatgaaatcaccaccttgtaggctgggtggagtggctcacgcctgtaatcccagcactttgggaggccgaggcagacagatcacctgaggttgggagttagagaacaccctaaccaacatggagaaaccccgtctctactaaaaatacaaaattagccgggcatggtgggtaatcccagctactctggaggctgaggcaggagaatcgcttgaacccgggaggcgggccgagatggtgccattgcactctagcctgggcaacaagagtgaaactccatctcaaaaaaaaaaaaaaaaaaaaaaacaaaaacaccttgtaaagatatctgaactcctatgttctttgtgacattattcacaatagccaagatatggaagctacctaggtgcccatcagtggatgaatggataaagaaactgtggtgcatctatacaataatatgttattcagcctcaaaaaaggaggagattctgccatttgctacaaaatggatgaatctgggggacattatgctaagtgaaactagccatacacagaaagaaaaatattataggatctcacttatatgtggactctaaagaaaaaagtcaaattacagtgaaagagagtaaaacagtggttaccagaggcaggtagaggggagaacaggggagatgtaggtcaaagaatgcaagtagcaaacatgtaggatgaacaagtctggaaatctaatgtgcaacatgagttaataatagtgtatggcatttgggatttttgctaaatgaatagattatagctgctcttgccacaaaaagcggggggtaactgtgtgatgatggatatgttaatttgcctcactatagtaaccattttactgtttatatgtatctcataacatcatgctgtatacacacaaaataacattttttaaaaaaatacttagaaaatatgagaatatttaaaattaggatacatcaaacatcatgattttgccacaatttgatgattttcattaaaagaaaaattcatgtaatttgtaaccattttactgtttatatgtatctcataacatcatgctgtatactttaaatacacaaaataacattttttaaaaaaatacttagaaaatatgagaatatttaaaattaggatacatcaaacatcatggttttgccacaatttgatgattttcattaaaagaaaaattcatgtaatttgttcccacgtgttgtattttagggttgacataatagaacgctatcaaaattaggaagtttcataatgatccatgtatgtacaactgcactcgggtacccctgtcttctctcacctctgtaagagcaattttgtttgcatctctcaagactctggagacatgttttacaaaagcagtttgaagtgagtattcattcatttgggttttcctggtgtggccctttcagctctgcagaatgccacagcaatgaggaaactgtttgtttccaagcaggagatgccaatgtgatgacagactttttgaaagcatgtagctggtggctgttaaatctgcatttcctgccatgcataatggtccataagctgctggatgtgagcagagagttggttaataatcaagccttctttttcatagtgtttaacaatgcaaagtgcttttaaataattattttagctaatcttaacaataaccctatgagatcggtagggatatcctggcaacataagaacatattaaacgtcattctcataagacaaaggtctattttccccagtttagaacctaggtactctctgataagtagaatgcacacttaaattatattattttcaacaaatgtccattgagccccacctatgggccagtgggcactgcaagatgttggagagctgcagatgaacagatgaacaagacacagctgcttttctcaactccgtctctcaggagagagacatgaacaccactatcatcagatgctaaaagtgccataatcaatgtcttctgggaaaatgagggagaggagagaaggtttcagagagctgcagaggatgtttgtgctgataggattctgtctggcagtgaagtgaagggaggacattccagggaatgggtgcagcatataagggggcagaggcatggactacatgatttcttcagagaatgagaggggaaggaaggatgcattcgattagcagatggtggagagccttgtttgctgtgccaaaaggcttgaattagtcccacaaaccacggaggcagtaaagagcagatctagttaggtgtgaatccaaattccaagaacttgctgacttgggggagttgcttaatcatcatctgtaaaataggggttatactcaaccttctgggttagttttgataagcactttataagctggtgtatataaagtgcttggcacagtgcctagcacacagtaagtgttgactattaactactatccagtaatatttcctaatcttttttgaatcaggttcctttgagaatgaatgagtcctctcctcatatacagtattttgtatattatttaaggggattcacattatctcctgaaactggagtccaagataagagtcctgctgtgtcttctcaaaatttttttaactttatttttttttagagcagatttaggttcacagcaaaattaagaagatacagagatttaccttatattccccacccctattcatgtataacttccctgatgatatcaacatcccttaccagagtggtacacttgttacaactgatgaacccacattgatgcatcataataaccccaagtccatggtttaccttagggtttgtccttggtgttatatattctatgggtttagacaaatccataatgacacatacccatcattatagtatcatacagagtagtttcactgtcctaaaactctgcgctctcatctgaagttttctttctttctttctttctttctttctcgctttctttctttctctctctctctctctttctatctttcttcctctcttttttagagtctcactctgttgcccaggctagagtgcagtggcgtgatcttggctcactgtaacctccgtctcccaggttcaagcgattctcctgcctcagcctcctgagtagctgggattacaggaacccaccatcatacccagctaatttttgtatttttagtagagacgggatttcgccacgttggccaggctggtcttgaactcctgacctcaggtgatctgcccacctcggcctcccaaagttctgggattacaggtgtgagccaccacgcctgacctgaagctttctttttctttttttctttctttttttttttttttttttgagacagagtcttgctctgttgtccaggctggagtgcagtggtgtgatctcaactcactgcaacctccacctccagggctcaagcaattctactgcctcagcctcctgagtagctgggattacaggcacccaccaccacgcccggctaatttttgtatttttcatagagacagggtttcactatattggccaggctggtcttgaactcctgacctcaggtgatctgccttccttggcctcccaaagtgtggggattacaggggtaagccaatgcattcgtctttatgtgaaattttaaagcaggagagtgctaatatcaggttttattttttatttttgtggggagaaatactgggtattggagaaggacaccaactttggttctcaaattttttttttttttgagatggagtttcacacttgttgcccaggctggagtgcagtggtgtgatctcagctcactgcaacctccccttcctgggttcaagtgattctcctgcctcagcctcctaagtagctgggactacaggcgcccaccaccatggccagctaatttttgtatttttagtagagacggggtttcatcatgttggccaggctggtcttgaactcctgacttcaggcaatccgcctgcctcggactcccaaagtgctgggattacaggcgtgagccaccgcacctggctggttctcaaatctgactgtacattataattacctgtagtgattcttagaaaccctggtgcacccagcgtcactcttagatattctgattcagttggtcggggtcaggcagagcatcaggattttttacatcttccagggaattccaatgtatagccagttttaagaaccatttggctgtctccaatgttagacagccagagagaggagaagagcagaagacgaatggaaagaagaataaaggagaggaaagattcagaacactttggagatggaatcaatcagaccaagcacccaattacatgcagtgagggaaaacggtgtgaggtggtccaaaaggggaggaggtatttgtgttttgtttattgtttactactttttcttcactatgtaaaaaggaggagtgggcaagaagaaaataattcattcaacaaacatatacttaaaatacatgtattggccaggcatggtggctcacacctgaaatcccagcactttgggaggctgaggtgggcagatcacctgaggtcaggagtttgggaccagcctgaccaacacgatgaaacgccgtctctactaaaaatacaaaaattagcctggtgtggtggtgcatgcctgtaatcccagctacccaggaggctgaggcaggagaattgctggaacctgggaggtggaggctgcagtgagctgagatcgtgccactgcactccagcctgggcgacaggagcaagaccccatctcaaaaaataaaaataaaaataaaaataaataaataaaataaaatacacatattaagtgcaaactgtggatcgagattttgttttgggcatctttaacatgcctgtggaacatggacatggcacataggcacctgaaaataccagagcaattggaagtcaccaattcataactgggtgatcgtgaaagagtgtggatgagatcaccaggagagagtcgaggagagccaagagggtgatgaacatggggaatcatggaccacggaccccgggggactggggaggaaagcctttgtgtgggatggtgagggcgtgagagaaggaggcaagagtttccagaaggagtgggtggccagtgtgtgaaatgcagtagagagatggccagaggtgaaggccaacaggagcaggcccctcacttgatgattaggagagggctgtggcttttgagacagtggcagggatggaagccaaattccagtggctgcagatgaaaaagaaagtgaggaagcacaagcattgacataggaagtttggggaaaaagcaatgaaagcagtagcacagggaaggaagggtggaggacagagctttattttagactggagtggcattattgtagtctgaggggaaggagccaggctagaggaagccatgaaaaatacagaagagggaggagacgggcagtggagccagggctccgctgcggcaggcggcccggggctcacaaacactgggtgaggaattgctcttggatgggactagggatgcttgtttcttggaggctaaagtgaagaagtttccagaatgatgcaggcctgtccgagaagccacccagggtcatttctgattcccgtgacagcctcctgcctatattctcccacttcccaggactcaatctattttgtgctccccttgaatgctgcctccaccccaggacttgaggctggctggagagtgagatgggatagctgaggtttccatctctttcactgtcccagaagaaaagcatggggcctctttctgtttctagtttatggctaatcacaatgcatgaagaatccagctgcagctacaaagatttgtggattctcaaaaggtcttcagttattcttactcattctttcttccccttctcagagggttctctcctctgctccctggctctcttgtattgaccttgcttccagttattatacattgctggacatcccctcttcctgaaagtctttctcctctgagcattagtgacattcttctccaggttgtcttcttgtccactgtctcccctcctgtttctgacctctagatgtggaatgccaggattctgtcccatgctccttctcttccccaggtacacgctctcagaaggccattgtgtctagtccatcactttaaatttcatctctacactgagatgtcctgacctcctgctccaataccagcaccccccactgtgtgactgaaatttccatttggatttctcacagggatctcaaatttaacatgcccaaaacagaactcttgatatcttccccccctcaatctgcaccttcttctggttttccactctcagtatatactggcatttgttccctcagttgctgaactggaaactcaaggtcagattcttctcccttgcaaatgcaatctgtcagtaaatcctattgactctacctccaaaatgatttgaaatcagtccacttcttgcatctccagtctggtccaatgttactcaaagtggggtttacagaccagccacatcagcgtcaccagggaacttgttagcaatgtaaaatgttgaggtcctttccgtccagaatcagacactctggggatggcacccttcagagaattctgatgcctgcccaggtttgagaagcactactctggtagtgccctcataatctccagtccaagccactgcaatagcctccaactgctccccttactcacttacccactagaatctgctctccccctacagccagagtgattgtttttaaaaacagtatcagattatatcacacgtacgccctctatcccccagtttaagatctcccatggcctccattggacataacacaatccaagttctctttcctgacccatagagtcctgaggtgagatctgactacacctaccactccagcgtctgccaaaacctcccttcccccttcctctgggcttcagctcaacgggctttctcccacagtgcatcagcttgttcctgacttgggacttctgcactggctgttccctctgcctaaaatgctcttcccttgaacttcagttgctggttccctcatgtcattttctgctcagtgtaactggcaccccctttagaggggccttatgccaatgaacaaatccaaagcagctcctttttacaaaatatgcagttttaacctgtatagcacttactactatcaatttttacaaattttcttatttattatctaatgcaacatttttggtcttaagtttttttttttttttctttttttgagacagtgtctcactctgtcgctcaggctgaagtgcagtgcgtgatgatggctcatagcagcctcagcttctctgatcctcccaccttaccctcctgagtagctgggaccacaggtgcacactgccacgcctggctaatttttgtaattttttttgatagagacgaggttttgccatgttgcccaggctggtcttgaactcctggcctcaagcaatctgttcatgtcggcctcctaaagtgctgggatcatgtgcgtgagccaccacacctggccattaatgtacgttttatgagacctgatttatcttgttcattgctgtgtccaagtgcctgaacagtgcctagcacatagatgctccctaaatatttgttgaatgaatgaacttcacttcttccttacttgtaggcctgaagttgctattaagaaataataattcaggctgggcgcagtggctcatgcctgtaatcctagcactttcagaggctgaggaggatggattgcccgagttcaggagtttgagaccagcctgggcaacatggcaaaaccccatctctactaaaaatacaaaaaaattagctgggcgtggtggggcgtgcctgtaatcccagctactcaggaggctgagacatgagaattgcttgaacccaggaggcggaggttgcagtgagccgagatcgtgccattgcactccagcctgggtgacagagcaagaccctcaaaaaaaaaaaaaagaaaagaaataataattcatgaactagtgtttgctcaaatggttactcactcctctcatgtggctgcatttctggaagcctccagccagtgtcagtctcatctcggaggccggggtccacatattagtgtagtccccttacagcacatctcaaaaggaggcaggaacgtgagaagacattaccctgaaaagatggcaggagtgcgaaaggacactagtgggctactttcttagaactttagggagaaaatccgtgaatgatacctgagggcctctatttttgttgttgttgagtggtaggcaaagttgcctatttttttttttttttttttgagatggagtttcactctgtcgcccaagctggagggcagtggtgcaatctcggctcactacaacctctgcctcccaggttcaaataattctcctgcctcagcctcctgagtagctgggattactggcgcttgccaccatgcctggctaatttttgtatttttagtagaggcaaggtttcactatgtcggccaagcttgtcttgaactcctgatctcaagtgatccacccaccgcagcctcccaaagggattacaggtgtgagccattgcgcctggccaaagttgcctaatttttaagaaaattgtctttatggtcatagaagcctgggtttaagtcctggctctgccacttattgctgtgaaaccttgggcaaatcacttaaacacagtaagtcttaatgtcctcatttgtacaccaggggtgagaacagtacctacaacacaggaccgttgacaggctaaatgagacacctacaacgtatctggcaatggcaagccaccgcctgagtgtcagctattattgttattattttataatgagagagagagaagggtgactagcaccgagggctcaaaaaaacaaaaaacgaaaaaaaggctgggtgcggtggctaacgcctgtgatcctagccttttttgagaccgtggaggcaggtgaattgctcgagctcagaagttcgagaccagctgggcgagatagtgaaatcccatctctacaaaaagcacaaaaattagccaggcatagtggtatgcacctgtagtcccagctacttggaaggctgaggtgaggtgagaggatggcttgggcctgggaggcggaggttacaatgagccaagatcatgccactgcactctggcctgggtgatagagccagaccttatctcggggggcggggggtggggaaggcacagctatacacaataataagagaaacacaagctagaagtgcataaaaatgtcattcttcatcttccaaattggcagagcctagaagttggctgacactgttggtggaacacagggaagctggtgggagggtaaattggtacaacctgctccacggagagaactttggcaactgctaagaaaattacaaataaacatgtcctttggcccagtcagtccacttccaggaatttatgccacagatatcctggcacatatgcaaaataaggtaggttcaggttatttatttcagcactgtttgcttaacaaaatattggaagcaacctaaatatccatgagtagagaaaggttaaataaatcatggtctatttatacaatgcaacaaataaaatgaaaaacttcctgtatatactgatgtggaacactttcccaaattgattgttacatgaaaaatgcaaggtgcaggattgtatgtatagcaggatataacagaaagcaggttgtggaaaaaaaatatatacctgtatgcatgtgtcttttgttttgttttgttttgttttgtctgagatggagtcttgctattgtccgcccaggctggagtgcaatgacgcaatctcggctcactgcaacctccacctcccaggttccagcaattctcctgcctcagcctcccgagtagctaggattacaggcaccccgccaccacacccagctaatttttgtattttttagtagagacggggtttcaccatcttggccaggctggtctcgaactcctgaccttgtgatccgcccgccttggctgcccaaagtgctgggattacaggtgtgagccaccgcgccagcccatgtgtctttttatataaccagaagacctctgaaagggcagagtagaggaaaagtttttttgtacactcttttgtagttcttgaaatttgagccatgtgaatgtattatctgtttaaaaaaaaaggtgaagattttaattttttaaaacttgtgagtactaatgctcaatgcttcttacctgttacgtgatgattggttctaggaatggtggatggtaaatctctctcaatgacagcaaatgtcaaatacaaaagcaatgataacaaaggtactaaagacccagacattctttgggttctgtgcttgatgatgtaattgttggcttgcaagggagttgttcacgaggagataataacctggttatgcccaacggaatctgtatcaatcggcagagaatgttctgtatttctcccaagtttttgaaaacaatttttttctttttcatttcttccagcataaaaatgcatagttaacatgcatttggatgtcaactgtgagccatatggatttaactgtgctttttttggaaagaagcaagagggagagtggatatacattttcttcacgtttcttctgccttctatttagctagcaattttgtgagagaacctctaagcacagcttagaggaatgtgaagttggcctcccagtgggcactacttctctgttttgagagtttctctgcatggcaagccctcctatactcctgccaaacactaccagtctccaacttccttactacacattgcaaaattttatgcaggttttttcccccttccttctgatttgtttctaatcccctaactccctgcaagtctagttgccctgggtccttctaagactccatggaagtaaatgggtgttaatattattaattgattacttcattccataaacatttactaagtccctagtatgtgtctggcaccatgtcagtgctggaaacttgaaaaagaatgagaaatgattctgaatttaaggcacttacagttgttttggagagacagaaataaagtacagcgtgggaagtacgtgggtgctatgtgagcaccagaaaggggcacctaacccagctttcgtgggagagtgggataggaagggattcctggggaagcaaggcgtgaggaaaggcttaaaggataagtggaagttaaccagggaaggtggggtgagggggatgagcggggttggatattggaggtaaggactacctgtgtgagagtgagaaggagccttctgtgtgataggaggggtacggtttcagcaagagcgaaggcttagaggtgagaaaacaccccaggggtatgtgtgttcacgcagtttaactaggatgtgatgtgtgcagcaggaaatggcagtaaatgaggaaaggaggacgttattgagaacatcaagtgcaacagaggggcagaaacacagggctgaagatactaacaagtaataggtcatgggtgaccttgatgaagtggtttctcaggagtggtagggcctgagacaggatctggtatattgaggagtgaaagggaggtgagcctacactcagatgatagttaacatttacaaaccactttctatatgacaaggctctaatgcattcatttctcacaacagcctgagaggtagacattatccacagccttattttacagatgaggaaactgaggcacagaaaggttaagcaacttgccaaaggtcatgcaggtagaagtggcagaactgagaccttaaggctccagaaaccaaactcctgaccagtaagaaactgggattccagaaatgcagccattgctagagagtgactcaaggctactggagattgtagcacatttatagacacaaagaaaggtgcctggagacatgcggagagtgatgtctgacagagcaaggtccaggaggataaggctgagccctggatttgacaacgagaaaatcactggtgacttctcagatagcagtttcagcagcagctggggacaagccagatgaaccagaatgaggggaaaaagggcttaagagccaccatttaagcacaaggggtggcaatgcccgagggttggatggagacagccccatccagaggcagcagaaagggagtgcattagtcagggttccccagaaaaaatataggagtgtgtgtgtgtgtgtgtgtgtgtgtgtgtgtgtgtgtgtgtgtttatggagagagagagagacagagagagagatttattataaggaattggctcaagtggttatagaggctgacaagttctaaggtctgcagttggcaagctggagacccgggagaattgatgatgtagctccagtctcaatgttagcaggcttgagacctaagaagagttgatgtttcagaatgagttcgaaggcaggaaaaaaatccagcatccaagttggaagacaggcaggaggagttccatgcaggccttcaattgattggatgaggccaacccacattagggaggacaattggctgtactcagtctaccaattccaagactattttctttttttccctttttttcctctgcatttttgctctgctttatcaaatgttgatttcatccagaaacatactcacaaacacacccagaatgatgtttgatcaaatatcttgtcgccctatggcccagttaagtttatatctaaaatgaatcatcacagggagataaggccaagtatgactgcagataaatctgttttggaacacagaaagttcagaagaggacagacttttgccctctcctaataacatatatgcatcaaactagaaacgatctttctttttttctttctttcttttccttccctcccttcctccctccctccctccctccctccctccttccttccttccttccttctttccttccttccttcctccctccctccctccttccctccttcccttctttttgacagggtctcattctgttgcccaggctggagtgcagtggcatgatctcggctcactgccaactccacctcccaggttcaagcaattctcctgcctcagcctcttgagtagctgggattacaggcgtgcaccaccacggccagttaatttgtgtatttttagtagagacggggtttcaccatgttagccaggctggtcttgaactcctgacctcaagtgatccacccgtctcagcctcccaaagagctgggattacaagcatgagccacggcacccagcctagaaacaatttcttaaaccaacttcagctggatccctgaggtcagggtgacgttttccatttctcaaatgtctttgaaagggtggaggctgagctttcaatagtaattattatttataacttttattattatccaaaaaagtgccagttttgtgattggcatttaaaaacactgagttatgttctgatgatgacagactcttgctaaccatatggttaccttgtatcagttaccgagatacacatgttcagccctgctaaatgtcctggcccttgaaccttttcacagacagtgcgtgagtgaggctgggcggttcagtgacctgggcggttcaggagtctgtcgctcagccaggaagtttcacagccagaatttaaacgtacatctgttagactctaaaaccaatagcctcaccactatgcaagcacactcgtaatccagtatgtccaccaaatttcattctaaactatcttaaaggagaaattttactttgagacagggtctcgctctgttccccaggctagagtgcagtggcgggatattggctcactgcaacctccgccttcagggctcaagcaatactcccacctcagcctctcaagtagctgggactataggtgcacaccaccatgactaatttttttttcttttctttttttttttttttttgagacagagtctcactctgtcgcccaggctgaagtacaatggtgcgatctcggctcactgcaacctccgcctcccaggttcaagcaattctcctgcctcagcctcccgagtagctggaattacaagcatacgtcaccatgcccagctaattttttttgtatttttagtagagacagggtttcaccattttggccaggctggcctcgaactcctgtgatctgcccaccccggcctcccaaagtgctgggattacaggcatgagccactgtgcccggcccctgactcatttttttatttttatttttgtagaaacaaggtctcactatattgcccaggctgagaaatttatttatttatttatttatttatttatttatttatttatttattgagatagagtctcagtctgtcacccaggctggagtgcaatggcacaatctcagctcactgcaacctccacctcctgggttcaagcgattctcctgcctcagccttctcagtagttgggactacaggcgcctgccaccacaccgaggttatttttatttttatttttattttttgtatttttagtagagactggatttcactgtgttagccaggatggagaaattttaaatgaagggtttgcaaggctctccaagaaaacagacaggcattatttattatttcccaaagcttttgcttcaaaatacatacaacatcttatttttttaatttaggaaatttttattaacaaaattcaaatttgagggggtttttgttttttgctgtcaataagtttattgtctttatctgaaaaatcctcacagaaagttgtttgatttagctctcagcagcccactcctgagctctgaggaatcttgccctcttttgagctaccctttcttccaagcaagggacattttgggacggttccacctcttctttttaacttctttcttgggcttcttctcatagaccggattctttcgtatagtagcatgacctttcttatacatctcctccatcatgtctgaagttacgctgttctttatgtattgagagagctgtttcttgtaagcatcttcatcttcctccattaagtagcacatgtactgcaacattctggcccttgatgtacttccggtgtatttctgcattaaattccttgctttcagaatcataaccagggaatcatttggtactgtgagggacagacaagcctccatccacagctcccttcagggtgccgaaaactttattgccagtggtagttctggcaaggcctgcatccaaatagcaggttaaggtgcctggctgtccatcagtgctttccacattgtattcatctccagtcacctccacttggccttcatagatcttgtccatgccaaacctattgagaagcctgcaggccaacagcaggctagtacaatatgctgcagcatcatttgtcaggccaaccttcacaccatattttggcagtttgtgtacatatgctccagactattatatccccttctatgcaggcataagcaatctgacaaatgatatatctgttacacgaactatcaacgtgtatttgggtgtgttgtatttatttttattctgtatcaccaagcgtttgtgagcatagtaatcagttttaccctctagttgtcttctgaatttcatttggtatctcttaaagtaggccttattcttaacaacttgaacaacaaactccatcctgtggaacagagacccgcatccgctgctcaacagagaccttgcaggcccagcagtgctgggggcagaaaaggcacaaaattcaaatgtttatttcaaataaatttaaagagggaaagaaatatccaccaaaatgttacctccggaattagctgtcacacttctctgtttcccctgagactgtctataggcatatacagtgtgtatgtgtatatatgtttgtgcagatatatttctttacataaagagcatcactgggtacctatgcacacataaaaatataattttaacaccattttgatggctacctgaaatacttttataacagacttgtctatgccataagttcttgggaaaacaaataatcataatatcaattgatataagaatatttgtcagtttacttaataaatgctaggaggaagtctgttaaaatttttttgtaatttgtattggagtgccttcactgtttaatatagactggagggtggtagagcatacaggtgaagtgtacaggctgaggcttaaatctcagctcccagttccccatttgctgtgtgaccttgagcaagtcgcttatcctctctgtgccttggttttctaatctatataaaggggaataatagaacttaaaagagttagtccatgtaaagtgctttagatcagtgcctggctcctggtaacaattagtttgtgttacaagatatattcatctgtactctataaacattcaagttgctgagtcacttagtccaagaaaaccccaaggcagtttgacacagctgaggcggttgtaggggaatttttcaggctgatttctggggtgggaacttggagtctgtatttttacagaactcttcaggtaagtgactcttaaggtcagccgggcttatgaaccactgggtgagaacactgggcacagttagacagcagttgggtggtgggcgagactggaaagattcagaacagtgagtttgagacggcccgcccagacacagtggccctttgtaagcagcaaagcagggtgatatgatatttaaaactggaactttgtcagctgagagtcagttgagataaagaaggccaaagcaacaaaaaggtggaagaaacccacagatagagtaggtttctctctgaagttaccgagtagtttgtgcgggaatattttttcttctttttgttccatttggttttgtgtatcttatttttaaaagcatgcagagatacattttttcctccttgtgataacagctaatgtttacttagtgtgtgtcatggctgtgctagcagtttttaagctttcttcatgtaatcttccagacagctgtatgaagcatgttctattgttcccactttaaaaggaaaaaactaaaatttggagacgttaaataacttacataaggcccatatccatttttcctttcttcttttgtaacggaatttcagctttatttggagtgttcacatccagtgaaaataaatttcccagtacctctgacagctatgtgtggccatgcgactaagttgtagccaaagagatgcaaataaaagaactatctagggccccgtgggaaggtttcttatagggtattgatttggctgtgaggtatgtccctatttacccttctcccatcctactttctggtgcctacaatgcagatgtgagctttggcagccatcttggactttgaggatataaagcatgtattcaatggtggtagaggggtggaggaagacagcgcttctgcccccagtgaccaaggagctgctataccagccctgggctgcctacctccgacttcttttatttgaaagatatataaacattttggtttttttttttttttttttttttgagacagagtttcacttttttgcccaggctggagtgcaatggcttgatcttggctcactgcaacctctgcctcctgggttcaagcgattctcctgcctcagcctttcaaatagctgggattacaggcacttgccaccatgcccagctaattttatacttttaatagagatgaggtttcaccatgttgaccaggctggtctctaactcctaacctcaggtgatctgcccacgtctgcctccaaagtgctgggattacagtgagccaccgcacctggcccctgaaagatatataaacttttatcttgttgaagttgctcttatcaacatacaaatatgatccaaaccataatactggcttatgcttatattacttatactttatcaaaggtaactatatgctagacacttttcttgtgatttctacatactgactcattcagtcctcataacagccctatgtgtacatgcggttattattcccattttgcaaacgggaaattgaagcaaagagaggttatgtggcttgcccaaggtcacatagctagcagtgacagagccaacaacacacagctaataaggccaggtgcggtggcttacacctgtaatcccagctttttgggaggctgaggcgggcggatcacatgaggtcaggagttcgagaccagcctggccaacacagcaaaaccctgtctctactaaaaaataaacaaattagccgggcatggtggcacaggcctgtaatctcagcactttgggaagctgaggtgggtggatcacttaaggtcaggagttcaagatcagcctggctaacatagtgaaaccccatctcttttttagtacttttttgtaaaaaatacaaagaaattagccgggtgtaggggtgcctgcctgtaatcccagctacgtgggaggctgaggcaggagaatcacttgaatctgggaggtggaggttgcagtgagccgagatcaccccactgcactccagcctggactcggtctcaaaaaaagccaaaatacaaaaaaccaaaaagtaaaaaatgaaaaataaacccatactcagtatgaatgtggtatgttttgtggctttccttacctaaaccttaccttctgctttaatttataaaatggaggactcctagctggttgccatgagaaggaaaccatagtctctcccgaagattaaaacagcctcattagggtccaccttaaagccctaattccttagtgaaacctccaaaataaatgtcatggatgcgttctaaagttaattattttaaaaagcatccatggaatctcacttgccattgttttcattagaacattgttttgcttttcttttatcaagcaggactctttaataaacagaattgagccatctagctgtctgtccattcaacaaacagtaagcacctgccagagccagccactctcccaggtgctgggatgcagcagcaatgaatagacatcacagaattgacattccagacacgggaggcaggtaattaacaaatcaacacacaagaaaagatcacgtgcaaacaagtgctacaaagagaagaggaatgtggtagaggcttccttaggaaggtttcactgaggagaagatatctgagctgatgcttggaggcaagaaggaagcatcttccagagtgagggaacggtgattccctggggtcagaataagcatggcttgcttaagggacagacagaaaccccatgtgacagaaacatgagcatggaagattggcatgagatgaggtcagaaagttaggtggtgccaggtcataccatacatcaaggccagttttgggacttttactctgagaggggaagctattggatggttttaggcaacatactggataattaccaccctgggcattgaaaagcccttcttatttttgggaatcacaaaacttgtggcatatcaggcatcagttccactattgaagctacaacttagaaatgaatagaaaagatggtttctctccccctccccctggcacttagagcaacgtcaatcagatagatgctcctacctgggactttgaatcatgaggtcatcttccaagacgtaaggtcagttagaaattaatagggtggctccccatccgggagggaggtgggggtcagcccccgccaggccagccgccccgtccgggagggaggttggggggtcagccccccgcccggccagctgccccgtccaggagggaggtgggggggtcagccccccgcccggccagccgccccgtccgggaggtgaggggcacctctgccgggccgcccctagtgggaagtgaggagcccctctgcccggccagccgccccgtccgggagggaggtggggggggtcaggccccccccggcccggccagccgccccgcccgggaggtgaggggcgcctctgcccggccgcccctactgggaagtgaggaccccctctgcccggccaccaacccgtctgggaggtgtacccaacagctcattgagaacgggccatgatgacaatggcggttttgtggaatagaaaggggggaaagatggggaaaagattgagaaatcggatggttgccatgtctgtgtagaaagaggtagacatgggagacttttcattttgttctgtactaagaaaaattcttatcctgttgatctgtgaccttacccccaaccctgtgctctctgaaacatgtgctgtgtccactcagggttaaatggattaagggcggtgcaagatgtgctttgttaaacagatgcttgaaggcagcatgctccttaagagtcatcaccactccctaatctcaagtacccagggacacaaacactgcggaaggccacagggtcctctgcctaggaaaaccagagacctttgttcacttgtttatctgctgaccttccctccactattgtcctatgaccctgccaaatccccctctgcgagaaacacccaagaatgatcaataaaaataaataaataaataaattaaaaaaaaaaaaaagaaattaatagggtggctgtggtggggtcaggagcgcccaggaatgagtgtgccgtggcagcagagtccagcatatggcaaccaatgtccactgacacctggctgcccgtatgtctcctgtggtatggtatcagtggcatagcaagccgtgctgggagctttgctgtgacagccttacttggtaccttgttctccagtcttcctcttgattctctgagctccctagtcactttcaataaatccctcctctgtttaaacattagccagaagttgttgtttgaaacccagcaccttgactagtacagcgggggagtgagccacattttcaaaagataactggtaaatggaaaatggatttcaaaagtctgctaaatggaaaatggtttaaaagggttatcagccattggccagtcagaaacagaagacactgtaggtatttcagtaaatataaagaattggtttcacaggcattagagggctgaaagagtaaaaggaaaaaggaagaggctaggtaacctagggattaataactgcaggaagcagctctcgctcccaaggctgaccaacaggagggaacaggtggagttgcctgtactgaggagcttggaggaggggccccacggggctggtgcttggatttctgaggacagctctgcctggctcagatctcggatgagggggttgctgtctggctggtgtttccaccaaaggggcgtggctctgcaggtgctcagacctccctggggtgcagcccagcaggtgagggggtgtggcatggctgctgctggcacctggggcttgaggggaggcacagcaaggttggtactgagaatactcagaagctggagctagggccagttatgtgctgctactgaagtaaaattgaaaacaggaagtggaaaacaaggtagaagtcccttcttttcttctgctttgtgatctccttctaatgcctcagattggaaaacctaacaggaagccagctagctgggaggtggagagatttcgtttgcatcatcccaaccccaggattacagagaagagcatagaaagatatcttggagatcacagataaatcgccagcacagacaacatcatgtccagttaggaggccatggcagtagcccaggagagagaagatgatggcccagacatttggtcaggtattctgggggtgtatgggagggtgttttgggtggaaattaactttttttttttgagacaaggtctggctctgtcacccagactagagtgcagtggcatgatattggctcactgcaaccttcgcctgctggtttcaagtgatcctcctgcctcagccttctgaataggtgggattaccggtgcacatcaccatgcctggctaatttttgtatttttttgtagagacagggtttcaccatgttgaccaggctggtggaactcctgagctcaagcaatcctcctgccttggcctcccaaagtgctgggattacaggagtgagccaccacgcccggcctgagatgaacatttgaattggtagatggagtaaagcagactcccccttaccaatacgaatggatgttatccgatcagctaaggtctgaatagaacaaaaaggctgaccctcccacgagcaagagagaactcctcctgcctgtcttcaagctgggacattggctttttttcttgttttcagactggaactgaaatgctggtttgtcctgcgtctctagcctgccagcgttcagactcaaaccacacttttggctctcttgggtctccagcttgctgactacagatttggggattcaacaaccttcataatcatgtgggccaactccttataacaaataaataaatatagatatgaacatagatcctattggttttgattctctggagaatcctgactaatataagtgccttatgagacaggcagggcaggtttatctccagaaagaagcaaatatggcagtttggaagcctccataagaggacaaaaatgaaaatgtaggacttcactcattcctttgcgtcatcatctgtttaaaccacattttcctctgtttatgtaactctcaatagtgacagggtttcccatgctcttttttctgcttctttccacaacggcatctacccactcacccgggtaagaccttgaaatgccctttcttttctcccccatctaagttgttgccaaacttccaaaatagctctttagtctgttcttttccatatttccccacaatttgggccttactcttttcttccctggagtacactcatagtgcgtgattacacatttgtgggactgttcattaagttgctctcccacaccagacttgaggttccaaaacctcactattgtgactccagctcttgtcacacacacagaggtctcaaaaagtctgttgttgaattaaccagactgcctatctctagtctcttactccctctaatcatactgcccaagagtgactaaatatgcaaatctgaactttccatttctctgcctgagagctcccttcagtccagcagaggtggtgagctggaggcccttgactgcatctaaaggtgttttgtttagccccctcagtggttttgttttttgttgttgttgttgtcgttgtttttggaataattgccaacttaaaaaatctgggcctgtcttataaatattgggaattccagcttttcttgacgatttcgaagatttgctaaccctgggtctgtacccttccatggcaacaactggcagaagctggttgaccgttacttcctttagttgggaatagactcagtttgacagatttgcttcaatcccagcagggccttcttcattcccttacttatccttcagtcctgaactccagggtcatgggaatcaagtttacatgtctgatcatggctgctagggccttccatcatctcatcctgcttacagtgcctcctgggctctagagccatgtagattatttacaggagacagtgcttcttctcacctctgtgctttggtcctgaaaagtctaggatgcccttctgatgaatggccacacctcataatccccctggggactcctcttaagcctacaggacttagcttggttcatatcctctgggaagatttcctccttggcagtagtcatgctcttctttttttttttttttttttttgagaaagggtctcactatgttgctcaggctggagtgcagtggcacaatcacagctcgttgcagcctccaactcctgggctcaagcaatcctcccatctcagcctcctgagtagttgggaccataggtatgcaccattacacccggctaatttttaaaaaatttttttagagacacagtcttgctaggttgcctagtctggtcttaaagtcatagtctcaagcaatccacctccctcagcctcccaaattgctaggattataggcatgagccaccgtgcccagccattcctcttcctaatgtactattcactttgttttggaattacttgtaaccatatgacccccctcaccagattaaagtaccaataaaatcacattctttttgagtgttaaataaattggtaacagcctcctttcgccaatttgtggaaactctagtggctcacattagagaactagaactggaaattctcaccagtttccagtaggcccctgttttccactgtggttgattctgttactactctacagtgctggtattaaaagttggttttgtagtccagtatgtgcttgtctgctgctgctgagatgacagtctttcaagttaatattcctcaccggccaagaggtcctcggggggaaggtgatcccatgccctcagtgttgtcttgttagaaatctttccctctttggctctttaacttacaatcttatgatcattcttttccccaaagcccactttcacaccaggatgactgggacgtgaggggcttcccagggacttctcctttgctcctagtgagttcttctctagagcctttttctcttttctcaccaggggacctcagttgggactgccccatttatcagaggagttatataaacctcaaaagggagagggttccaggtctccattcctcccctcccaggaagcttcttgtcctctatgcaaaattatccacattctccccaacagaccagctctgtacactgggaccaggttttctcacactgcaaatactctgtcccctctttctcccaggtaatgggtgcctccttctctatatttatacaatgtagataagccatcctggtgattcttctccaaagacttcttccaaggtaactagtgttttctatttggaaagtaggctctggcaactgtgaataggacagcttttcctaataataattttctaagctgcatcttgtcttaggtggggttccctgtaaaatggactcagagatggagatttatatgcagatgggatgttttggagtgtgttctcaggaacaacacctataagggagtgagagaagcagaactgggtaaaggaagagttgaactgtggtgcagttgcagcagaggcctcagctgactgggtaacctttcagtgtttactccagttgagacaaggagactggccttggtactccctcaatggccagtcattggccagtcattggatgcagactgccccaattccaggaaggggcattaaccttggggaagacagctcccttcagccaagggcaattcctggggatggactcatctgagtctttaatgggcaactctgcatagggaggaagagtgtctccatcttgaagcggtgatctgggcagtgcaccacagtgtccactatagacctatctagacataatctgttcatagctctgtctcctccactgtactctaagcaccttgctatggactgaatgtttgtatcctcccaaaattcttatattgaagtcctaatctccggtgtgatagtatttggaggtggggcctttgggaggtaattaggtcatgagggttgtattagcccattttcactctgctataaagaaatacctgagactggataatttattttatttatttttaatacataaataaaataaaattttattttccctctatttcccaggctggagtgcagtggtataatctcggctcattccaacctccgcctcccaggctcaagcaattctcatgcctcagcctcccgagtagctgggattacaggtgtgcaccaccatgcctggctaattttttgtgtttttagtagagatggggtttcaccatgttggccaggctggtcttgaactcctggcctcaagttgatttgcccacctccacctcccagagtgctgggattacaggtgtgaggcaccacccccggctgagactgggtaatttataaaggaaagaggtttaattgactcacagttctgcatggctggggaggcatcaggaaacttacaatcatggcagaacgagaagcaggcaccttcttcacaaggcagcaggagagagagcttgcatgtgaagtgggaggagccccttataaaaccatcagatctcatgagaactcactcactgtcacgagaacagcatgggggaaaccgtccccattatccaatcacttccctttctcgacacgtggagattacaggtctctcccttgacatgtggggatttcaattcgagatgagatttgggtagggacacaggaccaaaccatatcaagtgtggtatccccatgatgggatcagacactgaatttgccatgatctcatcctgccagcacctggatcttagacttcctagactccaggcctgtgagaaatgaatgtctattgtttaaaacaccaaatccatggtatttcattatagcagcctgagcaaactaagacacatcatgagggcagaagctaggaatgtccaacagagtgcctggaatagagtatccactcagttggtagacaagagatgaatgaataaatgcatgtatgaaagagtaaatataagcccaacaacactgtcattattatcgtttgcatttatgcagagctttatatatgcaaattactctgctaaaatatgttataaatatgtaagtgctctaagcaataattcttaataaaacctgccatcaaaatgaattaatatttagtaggcacaaactaggagcacgaaccctgtattagtcaactctccaagaatgcatctctcttcataatagaactatttggaggtttcagagccggcatcctaactcatctcttaaattgctttttatgccccctacattgttaaataaatctcctttccttgtgcccaaatcctgttttcgtgatatagtgtttcgaaagtctactgagcattttattctgctaccaaactgtttgatcttacctctttttgcatctcttctgatgtttgtaattttcttgctggtagtccgatttctcatggacacttatagttttgactattcagaacagcaactcccttctgagaaaggctccatcaaaaccccatgtgaccctagtatgtggggaaggtgacatcatagaacctcacccccaggaccacagtgattggcccatggttgagcacatgacccaagctggaccaatcatggttcttccctccaaaaggttttacttgggaaaaacaggaaaataagttgggaaagaagagggcttttttccccactctgtgaagttgcttgcttggctggaagtccagagctatcagaggccatcccttaccccgtgaaggagctgtcttgcaatagaagaagcagcccacccaaggagagaaacagggtgagaagtgggagggtcctgagagctttcaaattcctgatttcaggagctgaaatctcagagattctctgtttcctgacctcccaaggctcagctgtcaaattcacccttcattctggaagccacctcagcctgctgccaaaaatctcccttttgagctgggtgcaatggttcatgcctgtaatcccagctacatgggagaccaaggtgggaggatctcttgaactcaggggtttgagaccagcctgggcaatatagtgagacctcaatctcaaaaaataaaaccaaaaattcccttttagcttaagtttaaactaatgtttaagttgtgtttctgttatttcttatccagagaatcctcctgtacacccccctcaactccacatacatttgctaggatcactgtagaattcattggatttaagcagcaatctgaatactaaacatgtaaactttaaatcattgaagcaggcaactctccatgaggtgataaaagatagggttgaagattttcagctcaagagccttgggttcaaattctaccttcatcaccgactagctaagcgacctgccttagcttctcatttgtacaatttgcaaaatgctaagaggatcattgtgcacatttaatgcgattatatcttatatcttttcttttttttttgagacagagtttcgctcttgttgcccaggctggagggcagtggtgcaatctcagctcactgcaacctccacctcccaaattcaagtgattctcctgcctcagcctcccgagtagctgagattacaggcacgcaccaccacatccagctaatttttgtatttttagtagagatggggtttcaccatattggccatcctggtctcgaattcctgatctcatgatccacccaccttggcctcccaaagtgctaggattacaggggtgagccaccatacctggctggaattatatctttgaagtcacaggacagcacctggcacatagcaagaactaataaatgtagctataatgaccactactttcctctcttgtcattggtgtctcccatggcacaatcaccccatgggattcaatgcacattaatttacttaagagcctcaaatttcttcatttttacttttggattgttaaataaatattaatttctgaattgaatgggctttcccttggaccacattctacttcttcgttttgcaaatgattccatcctgattgttgctccttccctatttcttattagttatttttcataatactttctattcctatcccccaacaccattttcttccttccttaggaaattcttcttcttgtgcccatactctggaactttcctacgacaaggagcaatttgctgtatgtttattttctttggaatcatctctccttcatggaagcagggttatttatcaacctgtgatggagctcttcctggtttggttagggcatgctgcatactgctcctgtaataatgctttctttggccaggacacaaaccacagtcaaaaaaggtcttcctgagttctgaaggtcaagcaattagaattttctcaggcttgtagaagagtggaattctggaaaccagtcttcgcctcaggggagcatctgttggaagttcttaggtaagtactggacttaaaattggtgaagtgtaggtgaagttctcgctctgctacttcctgccaggtagctgccaggctagtcaccttacctctctgagcctcaatatcctcatctatcacatgggtgtacagtagcattattctgatgttgtgttgtaagttctcagaaaaagatacccaaaatgaagccctcagaagcaaaagtttttctctgaccttatcctgttctgtccttggcacctcattctgccactaggctagccacagaaactagagtctctggctaggcacggtggctcatgcatgcactttgggaggccaaggctgatgggtcacttgaggtcaggagcttgaaagcagcctggccaatatggtgaaaccccgtctctactaaaaatgaaaaaattagctgggcatggtggcacatgcctgtaatcccagctactcaggaggctgaggcacgagaatcacttgaaccagggaggtggatgttgcagtgagccgagatcgtgccactacactctaccctgggcaacagactaacagactgagacttgtcaaaaaaaaaaaaagaaagaaagaaaagaaggaaggaaggaaagaagggagggagggaaagagaaaagaaagaaaagagagaaagagaaagaagaaagaaagaaagaaagaaagaaagagaaaaagaaagaaaaaagaaagaaagaaagaaagaaagaaagaaagaaagaaagaaagaaagaaaaagttagaagctctcatctccaagagagatcatagaaaccagaaccccttttctctcaaagcccaccataaaacctaaaaatattactctaaccttacctctctaccctcaccagcctttttgtgtaaaaactggccttaaagaagttatctgacctgtcttatttaattgtaggttattggatcctcattccagagagggccctgctccatacccagaaggaaggaatgctgcacagagaggccaataagaatctagacagggctggctcagtttccccagcctgtgagcattagatcacccctttttgtccaatcacttttctacacagctgtccatacttcaaacctgatcataaaaatgggcagcgtcttctgtatctttgggtcttcattctgaagtctcccatgtcacatacaactctgatcaaatacatttgtatgccttttctcctatcaatttgcctcttgtcagtgactttcagtgactctttaaagggcagaggggaattttttcccctggtccctacagtgtgaaaactaaactgaaacaatatgatagtttgtgaattgtaaagtactacaaaaatgggagttgctactaatgcaaactttaataggaaaccagtgacagacataaagcagggaatagttcttcttagtttggatcacatagtgtcatgtgcagacacacaagactaattcaggatactttggtggagagccacattgaggattttcataagtaaagcagacaaatggaactagttattcatggccacagtccctcttagtagttccagagaataggctcatcaaagaataattttaggctgggcgcagtggctcacacctgtaatcctagcacttcaggaggctgaggtgggcagattgcctgagttcaggagttcgagaacaccctgggccacatggtgaaaccctgtctctattaaaatacaaaaaattagccgggcttagtggcgtgtgcctgtagtcccagctactcgggaggctgaggcaggagaactgcttgaacctaggaggcagagactgcagtgagctgagatcacgccattgtactccagcctaggcaacaagagcaaaactccatctcaaaaaaaaaaaaattaattttaatttgtgaatctcagtaggaaaaggtttcagaagtagagttaaatgacctacgtagcctcttaaatgggccttcccttcttctgccttcactgccatctttcctggatcccctgtcctcaagaagtcgggtctgcatgggtcatcaggaactctcttgccccatctggctcttatgatacagaattttctagtgctcactgccagccctacaactttttctcaaagttcagttgctgctaggctcagattttccctacctgaaaaacaggggtagtgaaatccataacacacgtctaaacagaacattttggaaacacagaaagatgactaatactgcctgggaggggggaagacttcacaaggaagctaattttagagttaagtcctaaaagtgaaggaggtgttgccagcaggtaaagggttggaaggaaccctgctccctgtcccccagtagaggtaacagcctgtgctttggacaaaggcctcaaagagcttgctgtgctcatgaagcagcaggtaatggtcctgctggagtgagggctacgtgggggttgggggaggggcctggtagtgctgaagcggaaggggttcgggggaaagggtcccctggagtctggccatgtgagcctgcgaccccaaccacctcctacccaccatttctcccacagctgcaaagaggcatcacttttttgtcccaaatggaaggtaattttgttagatgcatttttcagccaacctctgataagagttaaaaataacttccaaggtgagccccctgatcagtctcctcttttatctcctccttttctttaaacctcggcatctattatgagccctcccccatcttcctccctggggacagagggcctctcatgcaaataagactctggtggccagctgtgacagcccagagtcaccaaggtcagtattccgatcagggtttcaattctccaatactgtgtgtcggtggtaatctggaaccagttacttcatttctcctgcctcagtttccacattgattaaagggctgttggggataaattagatgatgtatgggcttctctgttcctaaatcctggttcttttttttggagatggagtctcactctgtcgttcaggctggaggcagtgatgtgatctcggctcactgcaacctcggcctcccaggttcaagcaattctccttcctcagcctcctgagtatctgggattacaggtgtacaccaccatgcctggctaatttttgtgtttttagtagagatggggtttcaccatcttggccaggctggttttgaactcctgacctcaagtgatccgcccaccttagcctcccaaagtgctggaattacaggcatgagccaccatgcaatgcctgcttctttcatgcctcaagacctttgccctttccattccctctgtcagaaatactcttctcctggcttttcatgtatctggctccttcttagctgaaatatcccctttttgggttgcctttcctgtctaatgtagtttcctccatcgttctctatcacaacactcctttcctcatagacgaattgcagcttatcattatctatttgaggacttgctgtcttatatcaggctttctaagaatggatcctgagatgaggatacatgggcaagtgatttattaaggaggggcagccagtaagggagtgggggagcaggacaggggtaggcaaggaggaaagtgcgggtgggatttgaggcagagtctcagcttaaacctgatcccacaggggagctctgcagtataaattctgccttggagtttatcccaacttgaagcaaataaactgtgtttttattcctgtagcagtcagtcagtggctaagggccactggggtagggtttagagtgggatagactcccatgcacttccatcttcctccagctgcccaagaacatgtctctggaaagttgcaggtgcggccatcgcagaaaacacacacaggagctgggggagaggcacagagaaacagtgtaggatccagccaacaggaccaggacagcactggctacactggcttatcgattacatcccacaatagaaagtaagctccccagggcagataccttatcttcctgtttactgatatatccctaatgccatttgcgtagtacctgccccatagctggcaatcaattactttcttaaatgaatgaaggaagctcttagtgcagtgtgtggcatataggaagtgttcagttaatgttgttggaaacatgagtctgtatactttttcacccttctcatgcttctatccataacatagggatgctcaggcatatggcctcagaaacatgggctattgagacagagaaaaagacaactctggaaggagagagcctggccttacagaagacatctgaactatcaatcaacagaaatctcacgtatagttgaaggcaagtcataagagtggggtgggagatggataagtcaatcctacagttaaaagaggggatgtctaaccactagacaattgtccaactcaggaagtaacagcttcagggtcctagacaacataggatttgacctcatgtgcgagaaggcaggatcttagggcctcagaggaaagggctgggattcaggacaaatatttggtcctggcagggctgaggagtactgaacaaagataacatggcaaaagcctaggccgatggagtggctagcctacagtgagcattaggcactaaagaaaaactcttttgcccttctcatacaacacttctgataccaaatgtgtggagtttttccacacaagcaattctccaattcactgctgtcaccaactgggtgtccaacaatcccatcccatcccatcccatcccatcccaccccatcccatcccatcccatcccatcccatcccatcccaccccatcccatcccatcccatcccatccaatcccatccaatcccatccaatccaatccagtccaatccaatcccatccagacactatctacctggagttagtgtcagatcccagaaggtaaagggctcaatcccacaagactgccctacttcagatgcccaaatcaaaagtctgggccacctgtacttacttctttttttttttttttttttttttttttttgagatggagtctccctctatcacccaggctggagttaagtagcacaatcttggctcactgcaacttccatctcccaggttcaagcctcagcctcctgagtagctgggactacaggtgtgtgccaccacacccagctaattttttgttattttttagtagagacagggttttactctatgttggccaggctggtctcaaactcctgacctcaggttggccacctgtacttctaaccaactagcttacaaattgggggctcccatgcctccctcctcaggtttgacaatttgctagaatggctcacagaactcaggaaggcactttacttacatttactggtttattataaaggctaccactcaggaacagtcaatggaagggatgcacagggcaagacatgggatggggaggggaggggtatgcagagctcccatggccttccaggcacaccatcctccctgcacctcaatgtgttcaccaagctggaagctcatcacatctcatgcagaacttttgtagagctctatctccagcccctctactccttccaggaggtcagagggtagggttgaaaatgacaaccctcccttggccaggtgcggtggctcacgcctgtaatgccagcactttggggggccgaggagggggaatcacaaggtcagaagttcgagaccagcctgaccaacatggtgaaacccatctctactaaaaatacaaaaaattagctgggcatagtggtgcgtgcctgtaatcccagctactcaggaggctgaggcaggagaatcgcttgaacctaagaggcagagattgcagtgagcagagatcacgccactgcactccagcctgggcgacagagtgagactccgtctcagaaaaaaaagaaaatgacaaccctcccaacacttggtctttctggtaaccagcccccatcctgatgctatctggaggccccaccctaagttaccttgctagcataaactcaggtgttatcaaaaggagcttgtggccgggcacggtggctcacacctgtaatcccagcactttgggaggccgaggcgggtggatcacctgaggtcaggggttctagactagcctggccaacgtggtgaaaccccatctctactaaaaatacaaaaattagctgggcatggtggcaagtgcctgtaatcccagctactcggggggccaaggcaggagaattgcttgaacccgggaggcggaggttgcaatgagccaagatcgtgccatcgcactccagcctggggaacaagagtgagacttcatctcaaaaaaaaaggagcttgtcatgggtaacaaaagacattcccatcattcaggaaatgccaaaagttttaaaagctctgtgccaggcagtggggcaaagaccaaatatatttttatttacatcacagactcctcaaagggtgataaacagtgacactttttggtcacccaagctattgagagttatatctcttagaattcttggttgcaaggtgggcaatcatcttatctcaagaactccctcagtcctgggcataccaggacaattgatcacccttttgcaaggaagagaaactgtcacagtttggattgcttgggaaccaggctctaaaatggagaacaggccgggtgtggtggctcatgcctgtaatcctagcactttgggaggctgaggcaggcagatcacttgaggtcaggagttccggaccaacctggccaacatagtgagaccccatctctactaaaaatacaaatattagccaggtgtggtggcaggtgcctgtaatcccagctagtcgggaggctgaggcaggcgaatcgcttgaacctgggaggcggaggttgcagtgaattcatattgcaccactgcactccagcctgggtgacagagcgagatgccatctcaaaaaaaaaattaaataaataaaatggagaacagcttgcagcaggtacgttaggaagtgctcctgggatcaccacctaagaaagaaaaaaaagagatggaagcaggagtgggcagaaggaggagaggggctgcaatgaagtctcagtgtaggcctcagccagtcccatggatgctcaaggctaccatggccagagttgtcgtgagcgtagcgttgccagaattagcagataaaaatacaggaagtccagttaaatttgaatttcagataaacaatgaataatttttttttttttttgagacggagtcttgctctgtccccaggctggagtgcagtggcacgatgtcgactcactgcaagctctgcctcccaggttcacgccattctcctgcctcagcctcccaagcagctgggactacagctgcctgccaccgcacctggctaatttctttttgtatttttagtagagacggggtttcactgtgttagccaggatggtctggatctcctgacctcatgatccacctgcctcagcctccgaaagtgctgggactacaggtgtgagccaccgcgcccggccaacaatgaataatttttaatatgtgtgctccgtgtaatactttcaacatacatatatctttttcactgtttatctgaaatttaaattaactgagtatcatgttatctgacaacccctcttgagtgggaaagggggccttatgacctatgttgaccagcctctggattcagattgctccagtgagggggtgtaaccttaggtaaagagaccctcttcactgaggccatgctgaagagggctgacagctgagggctgtctgccagcagcccactcaacagctgagagaataagtccttcagactggaagggaaccgtggagagcccatcacagtgtctgctgccgaaactgactctcggctggaatgtactgggaggatattgtattgcacagaatcaatgggagggatagagaatctgcctcagaaaatagacataagaggctgggcgtggtggttcacgcctgtaatcccagaactttgggaggccgaggtgggtggatcacctgaggtcaggagttcaagactagctgggccaacatggtgaaacctcatttctactaaaaatataaaaataagctgggcgtggtggcacatgcctgtaatctcagctacttgggaggctgaggcaggagaatcgcttgaacccgggaggtggaggttgcagtgacctgagatggcgccactgcactacagactgggcgacagagtgagactctgtctcgggggaaaaaaaagacataagagctaagcagcaggaataaagtcaaaccacagtcacaatctggctgagttgctgttgcaggtactagaacctctgctcaccacccagtagaccctcagcctgctgctgccctattgaaaaatacccctccctccactattgcatcaagaggccaagtcctgctgtgagtatctgattgattgatttagcatgaccatcctccagcttccatggtggcaggaagtgtcctgcctctcatctagtcttccaaaatgagaattcccctcaaagattaaaagggccttgtgctagggacaacgttagaaacttgtgatgtctttaaaagcacctcactgcacgctgaatcatggtctgattaatcttcttcaactggcctcaaggagtgggatcatgagacttgggagagaaaatcatgtgtgattacagatctgattctcttaaatatagtataaaaataccagtgggtaactccaggagcaggaatgagtctaattatgtaggtattttacccgaacacaaatgttactttccaatgcagagaaaagtgactttgtcttgtggaatttgatttctgtggttatagtgactagcattgctgtattttacatctgaatctctacagagaaggaagagtaggcagaccactcctccaaatgatagatgatacccatcccacatataagaaatgttcttaggtttgtaggctaatcttgtatatcaataagaaatatagatgtttactacaattgtttaaacaaatttgaaaacatatcatagcaaaggtatattggaactgtttcacgataggtctcagtgggtagatgtgacatagtggaatcaccagtcatcatagatcttcagttctgtaggttcagaaacttttttttttctccctgagatgagtcttgttctgtcaccaggctggagtgcagtggtgaaatctcagctcactgcaacctccacctcccaggttcaagcaattctcctgcctcagcctcccaagtagctgggattacaggcacctgccaccacacccggctaatttttgtatttttagtagagatgaggtttcaccatgttggccaggctggtctcgagctcctgacctcgtgatctgcctgcctctgcctcccaaagtgctggaattacaggcgtgagccaccgctcccagcccagaaatcttattttttatcacttttccatctgttcatccttccatccatccatccttacattatctatgcatccatcccaccatctagtcaacaaatatttattaagcatctaatatgtgctgtgtactgagtgtaggtactggggatacaacggtgaataggagagtcatggctgtacttgtatagccaatattcactggagaaacagacaaaacacaagtaaacagacaaattaattgtaagtttctatcagcaaagaaggaaataaataagagactgaagtaggaaataaagggtgagagagaagatacttgtattagtcagttctcacactgctataaagaaatatctgaaactgggtaatttataaagaaaggaggtttaattggctcatggttccactggctgtacaggaacaaatggcttgggaggcctcaggaaacttacaaccatggtggaaggcaaaggggaggcagacatgtcttacatggctggagcaggaggaagagagtgaggaggaggtgctacacacttttaaataaccagttctcacaataattcactcactatcacaagaactgcaccaaagggaaaatcccacccctcatgacccaatcacctcccaacaggcccacctccaactttggggattacaatttgacatgagatttgggcagagacacagatccaaaccatatcaatacttattttagataggatggtagaaactagttctcactaaataaaaccagtttgtaaaccaatgtgtctctctccaaggatagaggggcttaatttaaaaaacaaaacgaaaccaaaatccagctttcagaaaggcaagccttcatcattttctgcatcttgatagccttataaacatttgtgttacacctgtcccataaaggcatttgaattttaaatcctggactagagtcttccaaccaggctgctcccttcctgacttagtaaacagaaggttgctagattggctgggaattagaacataaattggacattcctataggataatattctttaaattttgagtctcagtctactcatggatatgaaaccacccccaacttgttatttactattatttaaaaaaaatagaatagacatatcagagtatatggcacatggattgggtgccactactgctttgtgaaaattttgcttgttttatttatatgagaacatatactgggctggaattcaaatctatttcttactgtgggacatataaatttctagaactctaatattttttagaaaaagaagatggaaatatgcaagaaatatacgagtgttattaaaagtgcagcatgtctgtgcatcagaaatatacatgattctgaaagccagagtgtcatagagagcaagacatagaagttaaatatacccatgttcaaatcctagctccttatgagcttagtggcaaagttggacaagttactagtaatgattatagctaacatttatgaacatttactctgtttcaagcactgggttgaatgatttgcagtattaagatatttaattctcaaaatcacctttctgagttaggtattatcagctccattttttacacgaagacactttggcccagacaggacaagaaccttacctaaaaccacactgttgggtgttgagctgggattggaaccaggtagactggcttttgcacacacacacttaactactatgccacaccacttcttatacaaaacctctctatgtcggattccttgtccatgaaggaagaccagcatttgcctcataggttgctggttctttctgcccctctctttcctgctagttgatgacacccaactgatcaacagaatttgtcctgagttaatgcccacctccaccacacttcctgggcatcacatctccatgcctttgctcatgcttttccttctacctggaatgttctccacattccctcctttccagctgccacctgctttctctagctaacacctactcaaacgtaaaggttcagttcagatgttactacctccataaaacccttggattctctcatcccttttccccttccctgtctggcctggcacagggccccatctgcatgctaccctagcaccaaggcatatacctaccacaacattagctacaagacagtgaacccaactgttcacccatcagtctcccctgaaaggtactaatgaaattcacatcggctaggccatgtccttgtgtcagtagcctaagccttagcacaagcagaacctggtacagagtaggaactcagtaagggctggtaaagtgaatttaatcagagtcacgcataaccctgtttcttgtgtctgtagaatcaccctaaaatgctttaagcttctctacagaaaataacttcctggctgggcgcggtggctcacatccgtaatcccagcactttgagaggccaaggcgggcagatcacctgaggtcaggagtttaagaccagcctgaccaacatggagaaaccctgtctctactaaaaatacaaaattagctgggcgtggtggtgcatgcctgtaatcccagctactcaggaggctgaggcaggagaattgcttgaacctgggaggcggaggttgtggtgagccgaggttgcaccgttgcactccagcctgggtgacaagagagaaactccatctcaaaaaaaaaaaaaaaaagaaagaaagaaaataacttccctataaacataacaagaaaaagtctgtccctaatacatggaatcaaatttattcattcaatgactttttattgaataactactatgtcccaaacactgttgtaggcagtaaaacaaacaaacaaaaaaatccacgtcctcagggagcttacatttttataattgcatggagaagacagacaaaataaataagcaaactgcaaactacacagtgtattagtgtgtatgtgtatatatatgtatatatgttagtgtgtgtgtgtgtgtgtgtgtatatatatatatatacacacacttttttgtgtgtgtgtgtgacagagtctcactctgctgcccaggctgaagtgcagtggcacgatctcggctcactgcaacctctgcctcccaggtttaagcgattctcctgcctcagcccctcgagtagctgggactacaggtgtgcaccaccacgccccgctaatttttgtatttttagcagcgatggggtttcactgtgttggccaggctggtcttgaactcctgacctgaagcgatctgcctgcttcagcctaccaaagtgttgggattacaggcgtgagctaccaagctcagcctattgttttttttttttttttttgccagtcaaatttaacattgtgggggtgttgtataccaactttagtgacactaatgttaataagctgtgataacccaccaccattggaccagcctggttttttttttttttgagacagggtcttgctatgttgcccaggctggagtgcagtggcgcagtcatagctcactgtagccttgacctcctaggcacaagcaatcctcttgtctcagcctcctgagtaactgggactacaggcacatgccacagtgccaggctgatttttaatttttttgtagagttagggtcttgctacattgcccaggctggtcttaaagtcctgggttcaagcaaccctcttgcctcagcttcccaaggaaccgggatcacaggtatgagccactgcatctagcctgtattagtatttttgatggtgttaagtgatatagacaaaaatcaatgagggaaagggaatagactatgccagcaataggtgggtcaccatttaaatagtacggtcagagaaagtctttctgaaaagatgatagttgaacaaacacccccccagaagtgaaacagccacagtgggagctgggaggaagaccttctgagcagaagaacagcaagtacagaagccccaagttgagagtgtgcccagcatccttacagaacagcaagtgggccattgggctggatagaagaggctaaaggtaaaattagctgggcatggtggtgagcacctgtagtcctagctactcaggaaactgaggcaggaggatcactcgagcccaagattatgaggctgcagtgagctatgattaacccactgaacttcagcctaagcaacagaacaagacactgtctcaaaaaaaaaaggtgagagttataggtggccaggttagagaggtaatggaaatggaggctgagagggggagtaaattgaggagggccttgtaggccattaaggattttggctttcaaaattgaacagattaagagtttaggataaggattaacaatacttgagtttcaagacaaaacgtttgggcatctaagtcctaaaaggttattgcagttatttttacaaaatcaaatgagactccattatttaaaagacaagcatagaaacctgtctagtttcaatattaaatatattaaaggagacctaagcacatttttttttctagaaacataccctatatgtatttctctgctactcttaataaattatcaagcctggctgtatcagcatatcaaacagtggcaagtgttcatctagccaggatgcttggcatgacatgaagtgaattaaatacacacagtccccggccctctcccttccccttcccaatttaaattccaacagaaaattctgataggaatcttgtagtgactaaactggaagcacagcagtagtacctgaacaccacagggtgctcctgcctaagcttccagtttcttctcaatgccaatgaactctgctaatcatgcacttctagggtttctatcagttggccacctttctatcccctcaaacctgaatcagtcattaaaaccacgcttgggccaggtgcagtggctcacgcttataatcccagcactttggg

SEQ ID NO: 55 - DNA, 24324 bp, Homo sapiens
cctcagcaggggttggtgtcccgagcagacatgctttccaagctgcggggagccttggagtgatcatcacagggttctcaagagagaagaggggcccagcatttcttctgctttgagggtttgcaggtcccgtggcaggtgctccttacaggccaggcacggacacaccacagccctgcaagcagcaatgggcatactcacttctccaaaccttgaggaggtccccggagcccataagctggctgctgattacatgatacaggcgctaactgggccccgtgggccctttgggagctgagggtggtgccacagtcccttcccccatgtcccacccacttcccctctcaggtctgtgtgggccctgtgaatccaaggcccatgaatgtggaggaatgacctgtgcccccaacagatcaacactcactctgtacccccatcctaagccaggacagtgagtgcctcttttgtgcttgtttccggtagttcccggccttttccatccttgagccactggacaagagtcctgatgtctttgatgagtcccgcacaatctctgtgggcgcccccttctctgcacaagtggcccttcctcatctgtgggacagaggtatcccaattagggaacttctctgctttgttttgttttgtttttgagatggagtctcactctattgcccaggctggagtgcaatggtacaatctcaactcactgcaacctccacctcaggccattctcttgcctcagcctcccatgggattacacgcctgtaatcccagctaatttttgtatttttagtagagacaggactcgccacgttggtaaggctggtttcaaactcctaacctcaagtgatccacccgcctcagcctcccaaagtgctggaattacaggcatgagccaccacacccagcctctgttctttaaagaggaaaatatgacaaggctgggggccaggggccaaggaaaggctaggtgggcaagcagaggagtgggctcatttcctctgagaacaaaattagttcagtttgcagcaagaagaggtccagttagactgaaaaaggaacttcctgagagcatgaccaggaagtccttctctaatagcagggcactgggagtgaaaggccatgggaaacatgcagtcctcctcctccatcatttcacaactgactggggccctcagaagagaaaggtctgggagggctcctccatgccacttctcagcatttaccaccttgaggacctggggagaaccctgcctggatggaatggggcagtggtgggaccaacttgctctgaggctaaggagagccagatgaccctcaagacaatcccaagtgtcctttgaggacactgagagccagcctggccaccaggaagttaatcattgacatgcacctgccctgtgccaggccagctatcatctcatcattggtacaacgctataagggaaattctgtggttccccctatggtgagtggcaaattgaggctcaacagcaattgatcaaagtcacagaaccaatatgtcatttctagtcctcccacagtcctccagaatccattttcttatcccatttcacagaaggagaaactgaggccaaattaagtagtcccacggcaagtcagaggcctccaaagtgtctgcttccaaagctcttttcactgtcctctagagactctgcattggacaacaataggagggattgaggttagaccctagagagacccaagggttctgacctgatgtctcggacccaggggtgggggttcagggcctggagaaagagcgtgggagctgagagctgtcactgttccacccagtgcagtgcccagccccagaaggcagggtgtagggtacagggtgacaaaacccaaggagaaatccagtgctgggtgcggcccagttatgaaatcacctctttactcagccccgagttctctccttacccaaggcagggtctgctgagaccatgggcagcctacatgggtgtggaggcattgtccaacacagctccagggcccttaccccaacctccataggatgtgcagggagcaaactaacagggcaaacctgaggcctgaaaggcagtggggaatagacaagggttagggaaagaggtagattccggactcatagcggaaaggggcacactaggactgtcccccagacccaagtccctagaccctgtctctgggagccatttaacctcaggaagaaagaccacaggcctctcattgcaccaaggtctgatggtctagagacagaggaaggtcttcctgctaaccggcccaaagcttcctgaggcagttgaaacctcttcccttcttgttctttgggaaacagaaattccggatctcagcattcttttcctctcatactgcaggctcccagcctcaggccccaatctaatgggctacagagtcagttttgctacctctggcggggggaccatgggcatcctgggggatcaggggctgcctttgggccagggcccaggaagaagggatcagtcgttgcagctaaggcgtctggcaagcccaggtgttccggctcccagcccagaggccccctggtgcctcgactgcaggtggacaggaagatggagccagagaggaaagtgggctcagtgttcccctacccgcctcttctctgtccccagctcagcaacagcacgacggctggccaggcggtgactgtggagctcttcctgacactgcagctggtgctctgcatcttcgcctccaccgatgagcgccgcggagagaacccgggcacccctgctctctccataggcttctctgtggccctgggccacctccttggggtaggtcatggccatgggttccagcctccctggaggaacagacacacagaccactccagagacagacacagagaccccaagagggacacatacacagaactctcaagaggaacagacaccccagaggtttgactcctagataccccagagggacagatatcactccagcccatctgtaaataaaacgtgatgttaattgtccatcacgtgggttccctttaggctgaggtcaagcactgcagtgcgggacaaggacttcctgccctgtcctcacctcccttctctctttgatgccctcctcccactgcagatccattacaccggctgctctatgaatcctgcccgctccctggctccagctgtcgtcactggcaaatttgatgaccactgggtaatggctgaaaccccctgccctccccttctctagaaacccattttagagggagaacaagagctggaatagcatgggatgggggctcagcagcggtaccccaaaccctccacactcctcctggtcctggggagccttgggttccacccctcagatctgatgccaaagactcagtttccatgtctgtgaatgaggatgacaacagcttacctcactggcttcttgggaacagtaagtgaggttaccggtgtaacccagataatgcagtgtctggcacttagaactctataagtggtagtatttagcacttatctggtgcttagtatgtggtgagccttgttctgagtgctttgcaaacattaactcagttttcacaaccaccccaggaggtagacattcttagagtgaaaggcacagagagggtaagtaacttgtcgaagtgcacacagcacttaagtggtggaatcaggacacacacaggcagtggcttcagaattcgcacccttaaccccgcactgacaaggcttccccagcagctggcgttgtcgttgtaattacataaataagcattttactagattaatgtcggggaggaggggtgcggccgcagagtgtgccgccggggcctgcgggctccgcgtgccggtgccggcgcgggtgccaagccgccctctccgctcgcccccaggtcttctggatcggacccctggtgggcgccatcctgggctccctcctctacaactacgtgctgtttccgccagccaagagcctgtcggagcgcctggcagtgctgaagggcctggagccggacaccgattgggaggagcgcgaggtgcgacggcggcagtcggtggagctgcactcgccgcagagcctgccacggggtaccaaggcctgagggccgccagcggcctctacggccccgacggacgcttgtgaggcccgaggcagaagggcccaccccgtccctcctctcccgcaggtctgaagttggccccccagcgcagagtagctgcttcctggacgtgcgcgcccaggccagtgctgtgagcaggcggggaggaggctgccggagggagccctgagcctggcaggtcccctgccctgaggctgtgagcagctagtggtggcttctccagcctttttcagggaactgggaacttaggggactgagctggggagggaggcaggtgggtggtaagagggaaactctggagagcctgcacccaggtactgagtggggagtgtacagacccctgccttgggggttccgggaatgatgcaactggttttactagtgtgcaagtgtgttcatccccaagttctcttttgtcctcacatgcagagttgtgcatgcccctgagtgtgaacaggtttgcctacgttggtgcaagtgtgcatggctggggacttctcacttccccttgcaccccttcctccccaacctgcaataaatccgcttctcctgcagtggatgagtgtgggtgccagtcctcctcaggagaaggggaagggaaggaggccactttgagagggctgaagggagggccttgatttccagccgcaatctggctcctcctggaaaatttcccccacctgcagcgctgggccccaaggcttgccaagactcattgctggaggtagagaggtgtcaaccagagaacagctcccctagacatggcctctggaaaaaggaaatctttggtggccaaagatttcctttctgtggtgagggagaacctctccaaagaggaagcaggcatatgagtgcgcacgccttcacgtgtgtgtatgctgtgtgtgcccgggacccccgtctccaggggtgccccagacccagagattagcctcccacttcggcgcagaaaacaaaagccctttgtgggacccgggcctttgtcttgggtgaggggagatttgcacctagacacttcttgaaaggagacactcagtttcacaagtgagccctcttgcccagcacacacctatggctggctgggcaaggcgctcaggcatgcaaccatgggcaccaggcaatacccatccatcacccatctcactctccccagtcctcaggcagcagcttttccaccccaggaatctctgttccttctctgtctgcctctccacagcccgtgatcccctgcttctggctcctaccactggacagtcattgtggatagagcagcctgctgctctcaggaccagagaagggaaatgacttctccaggcagaggcagatctgagtctagaacccaggcttctaaatttctaggccagtactactgctctcaaaagagattaactgggattaagtgagatgacgcatgtaaagatgctgtgtaaactgtaattcttaataccattatcacgcattactagaatcatttcattatttctgcttcctgggggaaggatgcagaaggagtctgatgctcaacatcccttacctcctttcgctgatggccaaagcaaaggagagtcctgggagcccacaagatccaggcagaaggagatgggtttggggctggccccatcctggcccagcctcttaacctcttcttaccctgaatgtgtgccctatcttttctcccacctccttcctcctaccacccagccctatccattctctccttccctctccagcctgctgtataagtaacatgtgggtcataccttgaacccccctccgcccccatgctctctgtggcctccatgccttcaagacttctgtctgtatctatctcacactgcaccaagcacccactgtgcaccaggcactaagtctctagcctctttctcccttctgctcccatccaagaaagacagtgtataaggaacatctctgtaattgtgtcccctctcatctatgctctttcctgtcttccttgaccaaagctctctttgaggtccaaaaaaggctgccctgggccatatgtgctatggagaggactctcccaaacccccaatagctagtgacagccacttggcctcactaccagaagaagggtggagtcagaaaccaaagtgacctccagagctgtcctcctggcacctgagtgtccttgctctagaggttcaaaggcagcaaggcagtgagctatgagcccagcatggatgtgtctcaggcacctcatccccaccccacctcaccccaacaaactcctctagaagaagccaagaatttctctctatgtctgtttcactttttggattgcatctccccaaaaactaaatgtgaaatccctaccatttctagcctctattgcccagattggagtcagaggtcaaaaaaggattccaagtgatggaactccaggggtggagggaaattggcagttcctggcatctcttgtgtaccagctgctgtgctgggtgccttgcatgcacgggcttatctgatcttcctcaaacttcagataggttagggaaggacaaaggcccccagccatgaagggttttgctatttccaaagcttccccttatcgtcccctgtgattatctcccaaccccgtgacaaaggtagagcaaatattgttcttcccattttacagattcagaaaccaaggctaagggactggtctaaagtctcacaggtagtatatggtggagccaacacttgaactcagacctttttacacaaaatcccatgatttttccactgagacaaatcctaggctcctgggaggccctggcagaagccagaacacatggctgggcctttccagcccaacccactgtcttgcagtggacggagagccttggcgagggcagcagggtagagaggacaaagaatgtggggctggtttctgccctttaagagcacccggtcagtcagagaacagagatcacacacaccaaaccagacagaggcagggcagcatggagacaggtagacagacctccaggtccctaagctggggacagagaaggttctgagctgtcccatactcccactttgtgccaaatgactttgcacctgcaaatggtgcttcaatgtcgttttgtatctttaagctgtgatgttgtatatatacaatgcctcccagctagactgtaagccctttggggacaagggctgcttccagttcttggatggcgttctcctatctaccttccttcaactgctctgcatataataagcactcaataaatgctcatttgccaataagtactgtttcttccacaacttggcagtggtaatagaaatacagcccaaggtaccagaagacaggcggagctccctaccacttctaccccagccctcaacttctcccagggaactcagaagtccccatatcaggagaggaggggaagggctctccctaagacattcaaattccccctgccacaaatggggagacccatcactcagctcacaaaggtcccgggcattcctctggagctgccagggcagggcctgagtgcttgggcaaagagaattccgagacataatgggagtttactgtgatgacttgaggacagagggactctagtggttagagagatggaagagcctaagacacaggccctaggaaacagaatcagctgccctgtgtgagtaaccttgacagatgaaatctccttctttggcctcaccaggcccactcctgatgaccaagtctatgtggcgacctgtggttcccatctcaggtcactgtgtgaccctaggcaagtgacctctgagtctgggtttcttcatgggtagcttggaatcaaatcacacagtggaggccaattataatctctaactttgtagattatattctgaatctctaaaatggcaagaacaaggtcttggcctttatagtccctcattagttcaaatcttcaggtcggagcttcccctggcagccaagcctcttgtgagcacttgtgaatcctttcattctgagatgctggagtttgagacctgtggactatgaagacagtgcctggggagagaggatgagaaagcaagtgaaagggtgcgaactggaggcaagttcagcagcaaaggagcctggcccccaatggcctctggggtcatcagggtcattgtccagcccaagtcccaggcccagaagaaaatcctgcgtacaactggcatgtacagctggcatgattggctggggacaaagcgctgggacccatggaagaaaggacagactgacctccggccttaagaggagagacctgggggaggagctgctccagcaggaaatgccagagctgggcaggaacaatagcggggtttctttagcccttgttttctttggcatcttagctgccacagagcccagagcccgctcctccaagtccttagcattcctgcaggctcctcccctcagccctgcctgacaaactgacagaggaggcacctgttctctacttcctctgcaccctcccgctggactcttccccctagcttagcaccacactaaaccctcaaggggcttttaaaattaacagtcacaacgtaaggagactttactgagccttactctgtgccaggcactgtgctaagggcttctctaacacacatggggatgggagtctttaatgcagctcctctcccgggatcctgggggtgggtcctccccctctaagccctagagagccctccagcctcgttctccacatgcccgacctggagtgggtgggaagagggagagggtggtgtgcgaggaggcagcaggtcacaaaggggttacaagctcagagggaagggggatgggaactggaagaaagtgtcacccagaccaggggtagaagaacttgactttggggagactgagaaagaccacatgtaagagagagagacatggaaaatgaggtagaaacagacagaaacaaagaaaggcacaaaaattaagaggcagaggaaaggtgaaaatagccaggagacagaaactgcaggatgagagaaatgaatagagagagacagagagactaagacagcaaaaggcaggaaggaaaaacagaaaatgagaaggtgtgagagagagagagatggagaggtggagaacagagagactgaaatgagaaagagacctctcggagagagaccgagaggaagaggctggcagagggagagggtcagagaccaaagacagagacaaaaagagaaatagggttttgcaaagactgactgacagaaacagatttcgaggggagagagatcaagaccaagtgagggtttgaaggagacttaggggaggtggaggaagagaaggagagtcttagatccagggtgaggggcttctagcaggaagagggaagacgccaagaccgcgcttgggaggtcagtggtgcgtctctaccccccctgctcccccactccaactcccagagtctcaaggcctcacgtcacacccccgtcccgtcccgtcgacaaggggaaccccggcctgggagagggcgcctccggggatccgttgcctagtccaggtactgcccagctaccgggcgtcgaggattgcgaagcgtcggggcaggctggcacggtgcccacttttcccaaaacgccagccttccaagcccagaagctcgcccggcccaggccgggagcggcccacgtcggacggccggaccgccctgcaggacccagcccggccgcccgcccccgccgccggcggtgagggaggtgagcggcgccgacctgcgggacgagcatcactccgacccagccgggggtgaggcgggtcaggatgctccggtcgcaggaggaaaaggaggagctggaccaaaagcccgaagagaagaaaaggggaaggccgcgcacggagcgcggtaaaggccggcggagctagacgccccgaggtcggagtgaagcgccgggaccgagccccgtctcccagggagtccggggcgcacggcaccgaggagagcgcgggagccaacctgggcgcatcatgcgcagggcccgggacgctgggccggtctacaccgccgcctgggtcacgtggcccggacgggccggcggctgccccggccggggggcgggggtcgcgccggggttgcgctggacgacggagagcggcgggcccgcagcggcctggagcctcccaacccgcgcgccgcgctggcccccgagcgtaggagccgccccctgcccccccgcgccggccccgcgcccggccgcccgccccctatatagcgcgccccagcagggcccgcgccaggccgccagcctcggagtgggcgcgggacagtgcgcggcgccccgcagccaggcccccgcccccgccgcatccacctcctccgccgcctgcgacccaacgggcgccccccgccgcggcagctgccgccgggcccccgcggccaccatgaagaaggaggtgtgctccgtggccttcctcaaggccgtgttcgcagagttcttggccaccctcatcttcgtcttctttggcctgggctcggccctcaagtggccgtcggcgctgcctaccatcctgcagatcgcgctggcgtttggcctggccataggcacgctggcccaggccctgggacccgtgagcggcggccacatcaaccccgccatcaccctggccctcttggtgggcaaccagatctcgctgctccgggctttcttctacgtggcggcccagctggtgggcgccattgccggggctggcatcctctacggtgtggcaccgctcaatgcccggggcaatctggccgtcaacgcggtgagtgccctgggggggtgggagcctcgaccctggggtgggctcaggaccaggcctcttaccccacctggaaaaaaggggtgccgcagagtgggccagcccacacccttcaccaggaaggcaagagcctcccaaggccaggaaggcaactctccaggctgatatgtgctcccttcctgcccacctcctctccccctcccctcatgctggcccaccctggtctctctccaatgcctgctacccctcctctcctgccagaaacttctgcctcctcctgtctcacctttgagctccaccttcctcctgggcccctcacctctcccatcacctcagtggagcggttgagtagaaccaccagagaaaagcgggctgtcatcacggctttgggtgaccctggcctgtctgtgcttcattgttctcagcgcctccatggggatggttgtgtctgccacagcaggtgtcaaggggctcacatttagaaaccgtagataggaaccccctaatgtggggccagtgcagagcagtttctgttgagtattggttccctctttccccaacctgtgctcctcccctcaaccccgcacccctgcctccctcccacctcctgcagccccagagtcagcccccaaccccatgcaaactgggttcattaatcaaacacagaggaggatttgcttggccattgtcaagctgtgagtcagccgcactggagagacgggtttaaggctggcactggcatggggccaggcacgggcaggaggccgggatggggtgtgaggcaggcaaaccgggcagctgcccacaggatggagggtaaatgccagcttatgggggctgggggttgggcagagccattgataggcccgtgtccaggaaaagctaccctgacgctctgccctttggccacaggcctgagcttcaagcctgtgcaaactatgaaatgtacagtgtctttaacaaatggcttcgctggggcgatgtccacaggacttggcttccaggtgccaaggtgctctaagtgtccctggaggccaaaagccctactccccgagcccctggctatacagccagaaggtggccggggtcctaacccgctatccccttgcagctcaacaacaacacaacgcagggccaggccatggtggtggagctgattctgaccttccagctggcactctgcatcttcgcctccactgactcccgccgcaccagccctgtgggctccccagccctgtccattggcctgtctgtcaccctgggccaccttgtcggagtgagcagtaccgacattgggctggggtgagggtggggcaggcactcaaggcaaataatggagccctggagcggagcccacttcagatggatgagtccagcagagtttaaggcctggatttagggctcctggactctggccctactgggccccagaattgatccccccaaaacctctgggctgaggaaagatgggagtaagtaggaggtgggatgggacaggaatcaaacccaacctcagagcagagaagagaggagggcgtagttaagggtccatggttaaccaagcagctgggatccttggagggagaggttgccagcctgagtttgagacctggctgagcccctggactgcagtgtaaccttgagagagtccagattctgtgggagtggaccaggatgttgcctttctctccaccgccctgtctctatccagatctacttcactggctgctccatgaacccagcccgctcttttggccctgcggtggtcatgaatcggttcagccccgctcactgggtgagtctgtcccttcccctggctccctggagatgagggcctggagacccagcagtggcagctcagagctcaccagacctggattctgtgggtctagagcttgggggtgggccagggagtggtggctgacagagaaagggacacagtaggggatgggattcagctagaggggcagaggtggctttgtatggcctgaaccgctggggacagggagtctgagtatctatccgcttatggaagaggctctactgaacctggaggtgcagaggggctctgtgtcaattcccttgaggatttggtgtccgtccccctcggtgtctgcgtgctggtcctctctgatgttttatttatctgtccctgttgagggggttgggagagtcttcctgtgggtctgtccctgtggacagtctgtctgccccccctttggaagctcatggtcactctctccagggtctgcttctatccctgcgtggaggggacacgcgctctgttcatccgtctctctgaggacccacgtgtcccctctgaaggtttatttgcttctctttccggtgtggttggagggagcctgtccctctgggaatccgtttgccttctttgagggtctaggtgtctgtggtccatgtctctgtccctgggagtggtgtgtcagtatattcgtccccgaggtgggaggaagtctttctccctgaaggtctggaagtctgcatgtctgtctcctctcagggtccgtgggtctgtcctctgtggggtggggggcatgtggtcttcaaggtctggggctcagcgccctgactcctgccctgtctccaccaggttttctgggtagggcccatcgtgggggcggtcctggctgccatcctttacttctacctgctcttccccaactccctgagcctgagtgagcgtgtggccatcatcaaaggcacgtatgagcctgacgaggactgggaggagcagcgggaagagcggaagaagaccatggagctgaccacccgctgaccagtgtcaggcaggggccagcccctcagcccctgagccaagggggaaaagaagaaaaagtacctaacacaagcttcctttttgcacaaccggtcctcttggctgaggaggaggagctggtcaccctggctgcacagttagagaggggagaaggaacccatgatgggactcctggggtaggggccaggggctggggtctgctggggacaggtctctctgggacagacctcagagattgtgaatgcagtgccaagctcacaggctgcaagggccaggccagaaaagggcgggcctgcagcctgcaccccccaccttccccaacccttcctcaagagctgaagggatcccagcccctaggtgggcagaggcagaccctccccagagctccttaggaagaagacagactggttcattgaatgccgccttatttatttctggtgaggatgcatgcgtggggctgctggtgtttagagtgggggctacccaataaatcactgatactcacgttccgcctctgtctctcctcagagtgccttgagacactctggcccattgcctctcctctttgtcatcccacatcctccaccacgatctccacagggtaccaggggaccccaggacaagtgctctgtgggaagaaagggagactgtgaccatgggaggcccagagaatcagagagatgggaacagagcagggagagactgagagaagaccgaatatcaaaatagagctagaggccaggaaggaggggtcctcactgcagtcaccctccacccctccccctcagccatgtcaatcaagtccctgccacttgaggagggcttggctggcacttgaggggagtaccagggtgtgacaggcagggcggaggagtgagccaaccgcagcccctcgagatggcaagggggtgaccagccaggttccatcacagccctgggctcgtttctctgcaccttgatctttcaaaaaggtgtcctgctgggagcctgtgcccagagggagcagccccccgacccccccagaagccacatgtggcccagcccccttttccagggcttctcatgccttggcccaccagtgtccccaccgtcctctcctctgggcctgagctctgtcctagcctgctcttgtcccactgtcactgacactccttaggtaacctccttaaactctcagagcctccctctcttcatctgtaaaatggggataaaatatcactttcctcacaagatagttgtggggaccagatgagggcatgagatgcctgggaccagtcagctttctgtgaggaaaaggcggggggtcatgcagtgaacagctccgcatagcccagcttcgcagtgagcccagcctggagtcagtaactaccctcattccaatctggccgtgaaacttggggcaacataagctctctgagctttaaggaccttatctgcaaaacaggggtacttttcccgacctcatgtgctatgtgctgtcgtgaggagaaaatgagaccacgcctggaggtaaaacgcttgtacaaatggtcaggcgccttggagtgagtgctcagtatagtcgtgttaatagaaacccacacgtgcctgcctagtctgaggccccagccacatgcttctgccctcctgggggtgtgtggacctgagcgcctgtccagcggggccaggagacggactgagaaggggtaggggaagctgtagttcttggccagcgagaggcagtcccaggggctggggtgaggagtggcagaccccccagccttctccacacttagagtctaagcatctacaagtgagaggtcagccactcatgtccgccccataggcttacagtaaacaccacgtggcattgcgtgtgagaaccccgggagcccagggaaggagcagccccccacccaccgtgtcccttcccacttcttccaacctgccccgggctgggggagccgggctgcaagtgccagctctggccagcagagggcgacgtcgtccaccgaatccacagcgtggcgcctcgtcgtccacaagtcctgggtctgggctctagccagatgggggtggagtggaggacacagggagtccctcatgcttgagtcccctggggccaccttgaggcagcctatcccaatgcatccccgccccgctatccgggtggggcgcagaagagaggggagcccttctccgctcagtctccaggagactcaggtacagacacagccatgaccaggaggatgggctcttcctccagcccaatgggggccacggcagggtggacagtggacccttgggagacaaacccgcgggggcaggcaaggcactaagtcagagggggctaccggccctgagcttcctgcaggttgcctcgcctggcccttgggcaggcttccagctagggcttggggctgacaagcgccgtggttggggcggtgtggccagcaggggtcgctgtgtctgcgtgtcggatcttgcaggagcggcaggtctgcgggctcacaaagtcccgtgcacacgcgcgcacacacactgaccccacacagtccggggctcgcggccacacactgacctcagtcgtgcccgagggctgcatgttccgggtgtgtgcgtctcctttcctccgcacgttcattcgaatgtgcagagccacatcagccctcctccagcattcgctcacagggccaccgccggccccaccgcgggcccagacctatgagcctggctccacgggttctcagaggcacacctgtgtgctgtccaacgcaagcacacacagtccccgtcacctctgctgcacctaaagatggaacccagggagagtctggattctcctgtgggaggctcccttccccttcctccctctcttcctctccccagggcctgccagttctcaccagctgggaggtggacaaggtgatatggggagagatggaagaggaccgggaggagaggtggagagcggacagaggggctggctgttgagatgggtggacaggaggaaggacatctgggaggaccaggtctctccgctcctcttggcctcatgtgtctccgtcatgtgtggatgaggacatcagacctccctacctttccaggttttgtggggatcactgagatgaggcacgggaagccatcttgaattccctccccatcagtttgtgttctccctccttttctctcccggtaccttcctccttcccctccccttcgccccccttactttccccaatctctaataggacttcagtcagagctgcattgacaggcagccctaggcagccagataaggaacctcggcaaaaggtttttgagcatgaatgagcttaaagcttggcactagagcccagtgctggctgggttcgggcacgtgctggctaggacaggaagccaggcctggagcaagccctggtcaatggctacctggcctcaggaggtgaaggaccttgtcccaggctgggcagaggtcaggagactcagccccgagctagctggggacaagggctgccactgcacttagcactttcaggctccaaggcccagggcaggtgctgaggtgcctgtcttggagccgccatgcagccccgtccccacagctgtctaacggcagggggcagggaagttacaatcctaatcattcacattttctgacttggaggccctctcctaggtatcagcacatttactcctaactacacacagggaggagggaattattagcatcatccccactgcataaatgaggatcttgaggttaagcaactgcttagggtgcaatacacatggcagtgttcacaatcctttcagtggcctcatcagcagctctcaacaggtaagcattgctgccacgtggcgcccatttaacaagggcagaaactgaggctaggtcagatgaaagtgcctgtccaccaagccctctactcgccctgcctgaagtgagggaagcagacaagtgcccttgagctaccctgggacagcccccagccagggaaccccccgtgccagggaggaacagtgcccacgccgcccccacagccatgcccagtcatcccttgagcatttattgaatgacccctctatgccagccagggatggatgtctgtgctggaacagtggaggcattgaggaggcagaggccacaaccagcccctggctttgctcaagccctgcttctctaagaagcttgccctgattctgctggagagggaaatgagggcaggcttcgcagaagaacagcacttgagcaaagtcttgagagacaaaaaggagaggcatccaaactccacagcaaagggctcgttctggggaaatatgtctggcctgtttggagtaaagggtgcagggtgggcagtggaaggggagccttccttgcatgttaaacatgggtattcagacctgattctgaggcaatggggagccattgaaagctttagagcagaggagtaacttgatgagctttgcattttggaaggatctctctgacagtgagtggagaggagagtggtgtggaagggcacaacatagtctgagagcccaggaaggaggttaatgcagtcatcctggagaggtgataagggctgcactgggccagtggcaagtggggatggaaagaggtgtcaaatatgagaaagagctaccaggaacctggtacaaggaacctatttgctatgggctgggggaaggggaagcaccagatgcttcctgtgttctggcctgggcaactgagtgagagtagggtgaggaggagcaagccggagggtccagtgagaggtgagtgggtctggagtttaggagaaagatctgggccagagacagtgttgagagtcgacagtatctgcagggtgtggaagtcacaggtgggaacagggctgcccaggcacactcatcaggagtgaggggccatgggccaggagtagacaagtcctgggcttaaggatcagcagaagaggagccagccatggaggccacgtggcagagttgccctcacagagatgggaggacagccaggagatgtgcctcaaaggcagggaaaaagaggcgtcaggaagatggccggcagcccatgtgccacagtgggctggagaggaaatcatgctggcctttgccagagcggtttcggtagccgggggctgggggctgttgtgcagtggataggtggctggaaccttgactccaaatcatgatctttcactgctccgcgactacgcaggcacgtttatagggaagaagtcaagagaaggggaagcctgaaagccacaggtgagactgggaaaggccaagagagggtcccagtcactcaaagggagccagaagtccaaggagggtcccccgaccccgacttgtacactggagaagggctgcccctacttcaaggccacagggcagctggtgaggccacagggcagctgcaggtgagtttggctgggagggaggatgggaagaagtcttgcctggtagcttggctttctaggtagggtgggaggcaagggtgggtgctctgctgagagaaagccagagtgagtcgaatacttgaagagagtgggggaggtttaaagaatgaggggagagctgtggaaggattgctgagcagagctgcgatccctactggggccagagaccatgaacttgtcatggtagcagtctgcacgactgggtgagtttctccagcagtgctcagcagcgcagatggggggcagaaaggcgtggaagaggatgagaacagagacacgcagcagggacggggtggagaggacagggagccaggaccacggagcgctgacaagagcctgctcagggtgagatgcccaggagttccctggagaggacacggtgaagtcgagacagcagggagaacagaaggaaatgggtgagggatgttactgggactcagacagggactggggaggaacagagcctgtagtccagagttaagatgtttctcttgaagatatcagagggctcagtcccaggtgggggaaggtatgagtatgaggctgaaatgcagcagacatagtcatctgccccgggaagtcaagaagtttttattcattcattcaacaaatatttattgggcagttactgtgccaatctctgtgcaagacactacatgcaggggtgaacaaaacttggttcccgccccccaaaggcctccccgccttgcctcactggggagacacattcacaccatgacaacaccctgtggtgactgcagtgtaggagaatgcccaggtgtggtgggagcacgcagaagggtccccacccaggaaaggagcaagcgacgtcaaagctgagcctttggaatgggagttacccaagcaaagggagtgcaagggatctccaagaagaggagagagctttttccaaggagaggccagcaagagtgtgcatttggtgaaaccagagggtaacagagtggggagaggtgagggagagctgcagggtccctgaaggcaggcacagagcttccagagggatgggaggcttggaagggattttagcaggggagcagcatgatcagatttgcattttagcacttgggctgcagtatggaaaattgattgaaacggagcaagggagcagacagagagactggtgaaaggctgcagggcggcaggggtggcaaaaagagggcacagtcaggagatatttaggattgaaaatcagcaggacttgatgcttttcctggatgggggaaggagggagaaaagggtcaaggatgcttcccagatgccaccagctgagctgcagaaaacaagaggagaacatgggggttggggggggtaccaggagacaggaggatcacatctggagacagattgcgtttgaggagcctgagaacaaccaggggacatctgtaggcaggtagatatgccagggatgaggtcaggacacccagctacggtgaagaggggaagactgttatttcaatagcttggcagactcttcttagggaggaacacttttgtttgagaagataccttgctatctgctagggttaaaaggggaaagcctagggcatgggtgaccatagggccagggaaagcctagggcatgggtgaccatagggccagtgcagccacaaaaaatggttaagctgccttgtgtgagaaaggagtgaaatctgtttggcccctgagaggaggagagcagagacggaggagccaagaagggaggggagcgcgggggagggcagggaggcaggaggaagtgagtgaagggccagtggaaatttcccctggtggacagcagaggtgcccatggccttgtgtgatctgacgcggtttgagtcgctgtggaataaaccccttctccacccgcccctctgcaaccccacaggccacagtgtccacagcgtccttggtaaagtcgactatattcacatctgcattctgtgagtgcgggtataggtgggagtggaggagggaacttactttctgggtttacgggcacggtgtggtgtcagcccatttggaagcaaagcctagatatggagggggccagacgaacaggacctgggaatgcacaggaccccctgaagcaggccggggatctgagtgatcttgctgtatctaagctgacattggaacatgaacagtctgaaatcccatgagccccgctgccctgcacctgcgaccctcaggctagaccttggactgtctacaacacgagtcaggcccaacccgccctggaaatcatcgtaggaggttccagctcagtgcccagagacagcccccacatcccaccccatcaggtcagctcaggctggagcaggcatatgagcaacacccctcattccacccccatacacatgcataagcccatccgcctgcgccctgccagtctgaccagcacagtcctggggacaggagcgtggtggaggagctgcaggtgggggccagagaagcctccacagagagcaaaagccagggtcagccagagacaggacaccagaagagacaggagatcagagaccagaggaacagagaagaggccccagagcaaggcaaggaacggccaaggcaccaggacatggatgcagtggagccagggggacgtggctgggccagcatgttggcgtgcaggctttggaaagccatcagcagggcgctgtttgcagagttcctggccacggggctgtatgtgttctttggcgtgggctcagtcatgcgctggcccacagcacttccctccgtgctacagattgccatcaccttcaacctggtcaccgccatggctgtgcaggtcacctggaaggccagcggggcccacgccaaccccgccgtgacgctggccttcctcgtaggctcccacatctctctgccccgtgctgtggcctatgtggctgcccagctggtgggggccacggtgggggctgctctgctttatggggtcatgccgggagacatccgagagacccttgggatcaacgtggtaggtgcagggaggggcacctggagggccaggaggcgggaatgcgcacaagtggtgaaggtggaggccaggacggaggcgagggagcaaaggaggaaacaagtcagctgcaggctccacatcctcccgggctgggccccaggacccagaggactgagactttgacctcagtctaggcagaatagaaatgggatagtggcgcgaagaacaggtggagaaggaagaggccacataaaggagaaggaatagaaggaccaggcgtttaagggtagatgcggccaagggagtgcggggcctgtgggtagagaaggggaccccacggggacttcatttttctcccaggctccacccacgtcctctgctctccgactgttcccaagttcttccctccacctcgaggcctgcctcactcgccccttctccatttcgtaaccatctgtgttccaccttcttcccccaaatctcctccttccacacctgctgccagtctcctctcaagcaagcctcctgaaccactggccccaaccaacccactggtggggtgggaggagcaccactcacttctgcagggagcaagggtccagagcagatatggacccctctgcacaggcctcccgaagtcctgaagctgggcggcagtgaggtgtcacccccttccagctgaggagaccaggcccagtggcaggggtttctctgtctgtccgtgggcagagcccgcgtctggtccagagtaactccctctgtccaggtccggaacagtgtctcaactggccaggcggtggcagtggagctgcttctgaccctgcagctggtgctctgtgtcttcgcttccaccgacagccgtcagacatcaggctccccggccaccatgattgggatctctgtggcactgggccacctcattggggtaaggaacagaggggacaccgtgcacatgcacacaccgggtccgtccccggggaaactgtggagccctgaaggccaggcagtgtccctccctgagcccctcgtgccttggagccaaagtggtaccccctgcactctaggcccaggatatggcactacagaggccgtggctggggctaaggctctgagccaggactgagaaatggtcccctctcaggcctgccttaaaccttctcccaccctgaccctgcacttgctccccagatccacttcactggctgctccatgaatccagcccgctccttcggccctgccatcatcattgggaagttcacagtccactgggtgagcccctctgctggcagccctggggagggaagggagcctgagttgcctgtagacggtgggtttcacttgcagcttccctaagctcagaaggccagggtgaatgtcttggctgagacttcctttcttttcggcttcagttgcccaggatacccagtggactggcaagaaatgggccagggcaggagctgcagccttggcccagacttttaagtcctggctgtttccttattcactttctccagctggaccaattttcaaacttggataaagaaaaagacaaacagaaatagacacacacaccagcagagacagaaacagcaatagccaggactcctggctaaaacgggggaagtgagaggaaagaggcgggggcgggtgaggagactggccccaggccccagccacggctgcagagcctgggctcagccccagggagggcagggagagcaaggggcaaggtccccttaccttgtgggcttgggaaacacgactcgtggttctcaaatttagcaccttacagacagttgagggagacctgggagatcaagtcggcactggggaagcaggcagcggtcccagagccaccctgtggtcctgatagctcctgggtggggtgacgacatccttctcctcaggtcttctgggtggggcccctgatgggagccctcctggcctcactgatctacaacttcgtcctgttccccgacaccaagaccctggcgcagcggctggctatcctcacaggcaccgtagaggtggggacaggggcaggggcaggggcggagcccctgaagaaggaatcccagccgggttcgggagccgtggagatggagagtgtgtgaaacagcctacgcctggccgcgcccttgggcttcctgccttgcaggacctgcctggaggttctccctgggggtggcgggagggggaggcttgaccttttgtcctgaccaggtgggctggaggggacaagcc

SEQ ID NO: 56 - DNA, 66029 bp, Homo sapiens
gacatagtgagaccctgtctcaaaaataaataaataaataaataaataaataaataaataaataaaataaaaatttttaaaaaagcctgtgcctaatttgaaagaaatttataaattttaagtttttagtcagggaagtggaaatgaactgtcgtaaaatgggaggttttatatttatttttgttcctagttactaagacaagaatgctattcaaagaaagtgaatgaatagaaaatgggagacactataatagtataacatcaagaatgcttaaaaaaacagtctcagaattgttctttgtacacaaaaacaatggtgcttaacaatatattggttcctaaatcaaatttccagctgccagcagccacccttgagtgggaggtgatttagtgcgagcaagttggttgcagcatgcctcctgcttcccaggcaccgaacccactggtagcagagctagaggactgttgagcacttggatccaacatcctactgctcatagtgccataaaaccatgaactaaaccttttaattattagagaacaatgatccgtaaggcaaaatcggtgttcttccagatggtattacttggggcctccactgctgcttgctcctgccctctggttgcttagatcttggggagcctcgttagatggggcaaagcctgcatgatctgacagcctcagtgagcagaccagaatcgcaggggagaatatgggacaacatgttctacaatgatggccttactattaggagagaagcccttgggaaacctacttcatgttctgtcatttttgccatttcgggaaactgccaaacctgcttatttgaagttcatccatattctttttcatcccaagcacccagaataccaaatcaaaatgtgaggaaagcaggatggtactagaatgtgggggcaaatatgggggccttcaaagctcatataattaatcaaatcgacaataaaaaatacaactagaatttcagctttatcataatggacatgaaaatgggagaatatagcctttgtgtttttcctagatgcattctaaattgtactgttaaagaaatttctgaacttttacatacaagtttttagttggtcattgtgctcataaaaatacttttagaaaacaagtgaaacttaggagtgctaatttagtaaaatggctgtcaagatctggcagactgccttacatcatggctcatgcctgtaatcccagctttttgggaggccgaggtttgcttgcttaagcccaggaattcaagaccagcttggatgacatagtgagacctccatctccacaaaaaataaaaaattagctgggcatgttggcacacctgtagtcccagctactcgggaggctgaagtaggaggatcaatcaagcccgggaggttgagactgcagtgagttgtgattgcactgctgccctccagcctgggtgacagtgagaccttctttcaaagaaaaaaaaaaaaaaaagatctggtagactgagttagattattaggatttctaaagatatatttgaaatcaaatgataaaatcctatgagttgctcaatattttacattttaataagattggagatttttcaaattataaaatattttcttcatgtctgtgatattttcactcagccttaaaatcagtacaaaagaactctcatccaaattaaaatcactggataaccttaaactttcccgtcttgtctcctgataacctcctgtttattctttaaaaatcagtataagcctaattttcctctatggaaattttaatgaatttttcctgtaggtaaagttatttttgccttccttgatgcccaaattctatctgtcctagctcaatggattcaatatttattgaattacccagcatgtgtgaaccaattacaaaattgaagacatgggtattgctatagtttgaatgtccccttcaaaactcatgctgaaacttaaccttccatgtggcagtattgagaggtagggactttaagaggattaataaattcattgattaatggattaatggcttcatggattaataggttatcatgggagagaaactaatggttttataacaaaaggaaaacagacctagctagcatgtgagcacactcacccccttcaccatgtgatgccctgcaccacctcaggacactgcagagtccccaccagcagcaagaaggctctcaccagattcggcccctcaaccatagacttcccagcctccaaaactgtgagaactaaatttcatttcttaaaaattatccagtttcaggccaggggtggtgggtcactcctataatcccaacactttgggaggctaaggcaggaggattgcttgaggccaggaggagttagaaaccagcctagtcaacatagcgaggctctgtctctacaaaacaaaaattaaattattttttaatttttaaaaatgttaaagtagcttggatgtggtggtgtgcacctgtggtcccagctactcaggagactgaggcagaggattacttgagcccaggagtttgaggctgcagtgagctgttattgtgccactgcactccagcctgggtgacagagcaaggccctatctctaaataaataaataacgaaccaacccaatttcagatattctgttataagcaacaaaaaatagactaagatatctaagaatataactgttagatactgtggcaggcagcctctaacatggtccccaatgatcccaccttttggtgtgtaatctcttctccttgaatatgggctggatttactgacttgtttctaatgaaaaaaatttggcaaaggtgatgggatgtcacttttgggattaggttataaaacaactagggctttttcttgagcatcttctctctgtctctctctctctctctgaaggaagccagctgccatgttctgagtactctctggaagggcctgcatggcaaggaactgatgtttccagccagcagccagcaagaactgcaagccttgtgaatgagcttggaagcagatcctcccctcactcaagccatgatatgacaacagcctgagacccagaggtcagtaaattgtcaagtttgtatatctagcaaatagcagagccaaaattcctgtcactcaaactcaagatttcctcatctataaaatgtagttgttccacatggccagatgcaaagtgtcatttagctataagagtctaatgaatctaggtcccaaattaagttcatcattgtcccctccttccccctacacccatcctcttctttcaggctccctgcccatgttttttttgtttgtttctttttttttcgcctgcccatgttcttgattaactgtcaaatcagtcaggctcaaacttttgaaaattttaacgccctctttttttctcccttctcatgtataaaatgagttctgcacgtttttttcttgaaattatctttttcttcttctccctagttcaagcttctaccatatcatgtgtggatagttgcaaaaccgacagagtgtccagtttttcctggcccaatccactttgtgtggatacttctcatactaatcttctttaaatgctattttcatcgatgcctccaaaaaccataatgagcccctgtttcttataaattatgtcccactcctctcttggcttagctctccaaaagccagcaccacccctgggagccagctttctaatccccaacacaaacctcctgcttcagtctatctggcttgctcttgggcccttgagttatccatgctggtgtctgcctctgaaactttgtattgtctttggattgttattttattgtttacccaaattctgccatccatagcatcccagctaaatccaacatcctgctcagatcccaagaggcttcactattgctaaagttgatatcacagatctttctagacccttaggggctgctattccccattaaacttccctattctctttccatacaagtacctaaaatgtaagtgtccccactcatccatcttatcctgtacactggtccccagacccccttgtgcctccccaaactcattccctcactgcttcattcctcctcatacctttctgctgtactctccggaacccccattttatggagagcaaaccatcctacatccccagcctgtctcccactccttgccttaacagaaacttggctatcttacaagaacatagcttcccctgctgctgtcttgaattgaggggtgtttactttaccagtcctcatatactgcggggttgggagcagggttggccttctcccagcttcacagtgctactgctacgccattgctctgaaaataaataagagattaagccagctggcatgcccgccccccatccgtccatgcctgtatcatctaacaccttcctgacactcctacgatgattttttttaaaggcacctggtttataatctttctctcctagattaaagatcttaaattacagctttaaaacaatatttttttattattctttctccttaaaaatatactataatacgccatgctggatggctcacacctgtaatcccagtgcacgggggggctgaggcaggagattcttgaggctaggagtttgagaccagcctagacaacatagcaagacctcatatctacaaaaaataaatactaaaaaaattagccgtgcatgatggcatatgcctgcagtcccagctatgaaagaggctgaggggggaggattgcttgaacccagttggaggctgtagtgagttatgatcgcacctgtaaatagccactgcacttcagcctggacaacagagtgaaactgtatccttgaaaaaaaaaactactataataaaatccctctataatcttatctatctgcaccctactccagtgatgaccaccatgcacagcttggtgtgcgtgcttctgaaactgcagtctcgaatctactttagaggtcattgtctttgtggattacctttaaagcaccctacccttcctgcacttttatctgctcaactccagggaccttcacctgcccccaactattctgtattagagggcttaaactccaaccttcctccctctaactacaacctcctttcccttctagttgcctcatgctgtccccatacctgcttttaaggtataatcacccaatcttttctttttaattgagctgaagttcacataacatacaattaaccattttaaagtacacacttcagtggcatttagtgcattccaagtgctgtgtaaatactagccagtctgcagattcaatgcaatccctatgaaaatcccaatttttttttttttttgcagaaatagaaaaacccatcctaaaatttatatgaaatctcaagggcccctgaatagccaaaacaactgatgtagaacaaagttggaggggttcacactttctgatttcaagacttactacaaatctacagtagtcaaaacaatatggtactagtgtgaggacatatagaccaatggaatagaatagagagcccagaaataaaccctcacatatatggtcaattgattttcaagaaggatgccaagaccattcaatgggaaaaggacaatctttgtaacaaatggtgctgggaaaactgcatatccatatgcaaaagaatgaagttggattcttaccttacatcatatatacaaattaactcaaaatggatcaaacatctaaaggtaagacctactcttagaagaaaatgcaggagaaaatatgacattggatttggcatatttgtttgatgtgataccaaagacaaaggtaacaaaagaaaaaaccaacagtggaccccatgaaaactaaaaacttttgtgtgccgaaagacactatcaatagggtaaaaaggcaacctacataatgggaggaaatatctgcaaatcatatatctgataagggatatgtttgggatatttccagaatatataaattactttttaaaacaaaaatatactatttttgtgaggtaaaagataattaaaatttagaggtttactctctctatatatatatgtatttgtatatgtgtgtatgtgagtatacaaatagaccccaacttatgatggtttgacttacaatttttcaactttatgatgggcttattagggtagtaaatgcatttttgacttagactattttccatttacaatgggtttattgggatgtaatcccatcataagtggagcatcatttgttttatagaatatatatgttgaggaagacatatataagttagtataataagcatcatgagattagtggccacatctggcatatgtaacattttttcccacagtgccttgtaacacaatcttgacccacagtaagttttcaatattttttaaaattaaatgaatgaatgacagagaaagaatattctgtttaatccctacattactaccagcattatttttctaaaattcagatctgtttgtgctgttccttgtttagaaatattgtgtgacctcacaatgcctttagaatctggtatgaactccttagatggtgggcagaccttccctccatctgttctcatgctcagcccccacatggtacagtagaaaagtggcttcagctttcatgtaccttggtcaaataggggcaatagacactacctcaaggattgttgaaaggattaaatgaggccgggcatagtagttcacgcctgtaatcccagctctttgggaggcagaggtgggcagatcacttgagctcaggagtttgagaccagcttggccaacatggtgaaacccgatgtcaactaaaaatacataaattacccgggtgtggtggcacgagcttgtaatcccagctactcgggaggctgcgacaggagaatcgcttgaacccaggaggtggtggttggaggttgcagtgagccaagatggcaccactgcattccagcctgggtgacagagtgagacttggtctcaaaaaaaaaaaaaaaaaagacgaagaagcagccaggcacggtggctcatgcctgtaatcccagcactttgggaggccaaggagggagatcacctgaggtcaggagttcgagaccagtctggccaacatggtaaaaccccatctctactaaaaatacaaaaaattagccgagtgtggtggtgggcacctgtagtcccagctactcaggagactgaggcaggagaatcacttgaacctgggaggcggaggttgcagtgagccgagattgcgccactgtactccagcttgggcaataagagtgaaactccatctcaaaaaaaaaaaaaaagattaaatgaggtgtcacctgaaaatttccagtgtatagttgtgatgagtcaattaacgtgtttccttttcaccctcctgcatgctgctcttcagcacactatactcttcacactttcagagtgtacatgtaatttcacttctccatattttgttcatgctttccccactgctttgtgtgtgtcttccccatcttccacctctctataaaaattaaatgaaagcttcaagacaagtctcaaattgcacttagtaaaagctttctgactcccccaggagggcttaattctttttttatgctttcatgtaattttataagacaatttctaagaaactttcatagactatcttatattacagttatttgtggacacaacttgtggacatgtatcttaagagcccaacacaatattagttaaactgagttgatttttttgaccaggaaatttggatcttaaatctcataactgaaatatatcatgaaatcatccaaagcatgctctctctatacatagttcctctctttatgtgataacacccagcctggcagtatagcacccttgccacccacagctctctggaaggtacagctgtacaagataacatgaggtaatgtgacttctggggataggtggtggtggggaagcccatcactgcttagaccagcgtcgaacatgcctgacccaggtggagtaaattatttgctcagaaatgacttgtgtggtccaggttctctcagaggagccaggctagttcatgaagaagaagtttagtgtgtattgccagttgattgtgagtactggagctcagtggtcttccttgtctagatccagaaagagcagccatgttgtgcctcacacaggatgaaggagccgaggaagacagacagaatgtgggagaggctggagctggctgagaagcaaagacaagggggacacagagggacaagccaccctgtccctgagaattccccagttttctggccaatttgggtgaaacccagcaactctttgtgttccatccgtcgatactgtgaggtctctctatacactcagtaaatgctcctttttacctcactggactaatgctttttagagtcacatgcatgctgacttcaacaaagcaaattgtttatctgaatcaactctgccgtgtaccatgtccagtcacttgaatttctatttcatctttgactctccatttgctaattatgactttgggcaaatcttttgttcactctgtgtatttgtccattttcacattgctgtaaagatactgttgagactggtatctttataaactggtaatttataaacaaaagacgtttaattgactcacagttctgcatggctggagaggcctcaggaaacttacaatcatcttggaaggaaaaggggaagcagggcgcatcttacatggcagcaggcaagaagaagagaaaggggtaagtgccagatacttatcaaacaagcccatctcatgagaactcactatcacgagaacagcagggggaactgccctcatgatccagtcacctcccactaggaccctaccttgacatgtggggattacaatttggattgcaattcaacatgagatttgtgtggggacacagagccaaaccatatcactctgtgtctcagtttctttagtaggtaaaatgcaataatttcatatggtgctttatcaatttccatacattatctcatgtgaatttttaaaaagttcttatgatacaggctaagaatttttccccatgttttacaaacaaaggaactttcccaagatctcacaattaagtcctagtgaaatgggactcaaacaccagtctctgacttctatctactcaggtggtcatcaactctacctcagagaatataaatttttttttaatggtaagtctttgcagattgattaagatccccttgagaatttttggtaaaagactttgaagtcataagaggtaacagtgacttcatattatatttgtatgagtcctgtttcaaaatatattgataatgtggctgggtgtggtagctcatgactgtaatccagcactttgggaggccgaggtgggtggatcacctgaggtcaggagttcaagaccagcctggccaacatggcgaaaccccatctctactaaaaatacaaaaattagccaggcatggtggcacatgcctgtaaccccagctacttgggaggctgaggcaggagaatcgcttgaacccagaaggcagaggttgcagtgagctgagatcatgccattgcactccagcctgggcaacaaagtgagactccatctcaagatagatagatagatagatagatagatagatagatagatagataatgaattctatgataggaccactagagtggagatctgtagttctaataaagtactttatttctaaaaatatgcataatacttgcctgtgtcatgggcttcatgaagaattccagttactatctgaaagtttaattgcaaggtttggagctcaagatgttacttatcctcatgggcagtacctgttacttccccactgtaaaatatgctagctcaggtcacaaggaactttgagtgctaggatagtaccccacggtccagttccccagaacttcttcccagtgtctccacagccactcacacagcctgagcaggtcttgccactggcagctctcttcccctacttcctccaggccaggggttggcctgattctgcttagagcctgcatgcggctccctcagagccttggggtggccaatctttgctgcttcccagaaccaccttgtactcttccatgcagagccctgttgagtcaccatgccttcctccagctgctgccacagaccacatggcttctttctcaattaactctgaaagagaaaagtacgttatgcaaaccaggtgggagcacaagagcgcaacccccttcctccccaacacagagaagcacactggggctccttgtgtaatttagaggttaactaacacatcatgttgcaattgtgcctatgtgaaaaagaaatggaaggaggaaccaggtttggagctgattctctgctgcaagggcttaccctcagtctgacctgtgcagtaagactgagagaagcactaagggtatggctggaaaagatcataatattaaaactattttactataatgatgatagctaccattgtagtgatatgcaataatattagtaacactgaagtctttactatatgccatcctgtgtgttaaatcttttatgtatgttgtgtatataatacatgtaaagccttgttgttgttgtttttgagacatagtctcactctgtcgcccgggctggaatgcagtggcgtgatctcagctcgctgcaacctctacctcccaggttcaagcaattctcctgcctcagcctcccgagtagctgggactacaggcgcctgccaccacgcccagctaatttttttgtattttagtagagacagggtttcaatgtgttggccaggctggtcttgaactcctgagctcaggcaatctgcctgcctcggcctcccaaagtgctagaattacagatgtgagccaccgcacatagcccatgtaaagcctttaacatagtgcctggcacaaagtaagtgctcaataaaagataatcatagcattattattttgtttatcttcacagccatcctgaattatttgacaagcctttgctcttcagtcagtcgttcctttagggaatgtttattgagcctgtactatttacccagcactatatatatatatatatatatatatatatatatatttttttttttttttttttttttgagacagagttttgcttttgttgcccaggctggagtgcaatggctcgatctcggctcactgcaacctctgtctcctgggttcaagcaattctgcagccccagcttctcaagtagctgggattacaggcgcctgccaccacgcctggctaattttgtatttttagtagagatggggtttcaccatgttggtcaggctggtcttgaactcctgaccacaggtgatccgcctgcctcagtctcccgaagtcctgggattacagacatgagccactccacccagccttccgagcactatattaggcgctggggatacttagaagagtgaatgccctttcggacatgggttccaatctggcttaaccactatctttctgggtaactttgagcatgcttcttaagctttctgagcctgagtttattcaactgttaaatatgtacaataatttctatgtcataagattgttgataggactggaaacacatgcaaagggcttagcccagctcagtgttcatacaaggagaagctcctcagccaggcctgctggctcacgtctgtaatcccaacactttgggaggctgaggcaggtgaatcaattgaactcgagagttcgagaccaacctgggtaacatggcaaaaccctatctctacaaaaaatacaaaaattagctgggtgtggtagtgcctgcctatagtcccagctactcaggagggggaggctaaggtgggaggatttcttgagcctccgaggtggaggttgcagtgagccaagattgtgccactgcactccagcctaggcaacagaatgagcccctgtctcaaaaaaaaaaaaaaaaaaaaattcaagccgggtgcggtggttcatgcctgtaattccagcactttgggaggccgaggcgggcggatcaggaggtcaggagatcgagaccatcctggctaacacggtgaaaccccgtctctactaaaaatacaaaaaattaaccgggcatggtggtgggcgcctgtagtcccaactgctggggaggctgaggcagaagaatggcatgaacctgggaggtggagcttgcagtgagtcgagatcgcatcactgcactccagtctgggcaacagagcaagactccgtctcaaaaaaaaaaattatttactatagaacttgtatatgtattcttgaaaaagaattcaaagggagaacctcttcccagggtcacagagtgatcagtgccacagcttggacttggagccttagcttatctgccatcttcctactgcatcaaagcagagattgccacgtgattgcccagtgtgattgaaagtttgaagtccgtatttctctgaaaactttggtgtatctagattctgtatgtctcttggacagatgaagagctgctgtacacagaagggagatttttttttttaattgaggaatctaactcaagaataaattcaaggccaggtgcagtggctcacgcctgtaatcccagcactttgggaggccggggtggaaggatcacctgaggtcagtagttcgagaccagcctgaccaacgtggtgaaaccctgtctctactaaaaatacaaaaatgagctgggggtggtggcgtgtgcctgtagttccagctactcaggagactgaggcacaggaatcacttgaacctgggaggtggagattgcagtgagttgagatcataccactgcactccagcctgggtaacagagcaagactccatctcaaaaaaaaaggaaaagaaatttggatcctttagaaatcttcagacacttggcataacatgaagttaaaacaacaccccacttagttccatgatatttctgatgaataagaaatatgacaccacagagtgaaaccaatatttttaaaaacctcctgaagagactttttttctttgttgattaccatccagagacaacatttgtttgaaactttgaacagaatcagtttgtagggatgaaaccctcattcttccccgcctgggcccagactttccatatcttgtactctgagaaccttaaagtcttgaaatgatttgcagtcccagcgaagaagctaaaatcaaaactgatttggggaaaaaccgtttactttctgacctctttgtactcttcagagaatttttgtatgcttgtttattttcttaatgtctcttggtaatgttttttcctgttttggtttcatatatgaaatgttccatctgtgtattcattttctggatttattccctagaattttaagtaagagtgtttctcaaactttttttttactccaacccacaataagaaatatattttgcatgttaacctaaatacacatatatttacatatatatctaaaacaagtttcatgaaataatactcttgcaatgaggtatgcactatggttttttaaaattctattccactttatatatacaaaagttgggacagaggttcaggagcagggaagggatgaataggcagaacacagggcacttttagggcagtgatagatgcatgacattatacatttatcaaaccccacagaactgtacaacaaaagagtgaatcctcatgtaaactgtggactttttattattattttttaagacagggtctcactctgtcacccaggctggagtatagtggcacaatcttggctcactgcaacctccacctcctggattcaagtgattcttgtgcctcagcctcctgagtagctgggattacaggtgcacgctaccatgccaggctaatttttatatttttagtagagacagggtttcaccatgttacccaggctgatctcaaactcttggcttcaactgatctgcctgcctcggcctcccaaagtgctgggattataggtgtgagccacccaccatgcacggccaaactatggactttggttaatgctagtgtatcaatattagttcattaattgtatcaaatatactttctgtgcaatttttgtgttaacctaaaattgttctagagcatattataaatatttgtaaaagtaaaacacgaagttggatttagcctactaaaattgactttactatccattaatgacttgctttccatggtttgaaaacttgtggccgtggcctggtggggagtaccctgggtttctcttaggttggtgcaaaagtaattgcggttttgccattaaatggcaattacttttgcaccaacctaataactacatcccagcctctgtcactctatagagcctgcccttcaacaagccacataataatgtctctcagctttctcatctgaaaaatagagtgtttgatcagatgaatgccaaggtcctttccagatccaaaatattatacctgtaagtataaattctcattttaaaatgtcttagagtaaaagaaaagtcatgaagcatgaattgtaaattatgtgcatgttatttaggcatgttttatgttttataggcatcaaatgggtacttttcatcttatttaaaataagtaaaatgaaaagtaattgttctccagcaaaatatataaattacatttctctctgagttcctgattcaagatctctgtagaagaagaataacaaagaacacctaggaatgatacaaatgatactttcaattttggcacttgtctgccctactgccatgtcctcatgagagtatccctgaactcagttctcgttggtcatttgacgtttgctgggagcgtactatgggcgaggtcttatgctgagggtgagcctagtggtgtctcacttcttgtagcttgggtcaggaaatggagatcagctactgtatcccagaaccttcttgccttcccagtcccaaggcaggtgctgtgggaagagtgtgtataaggtctgatggggacagacctggggtgaatctcagtggcacttctcaacagctatagatccctaagtaagttatctaatcatcatccccacagtgttctcagatgaaaatggggggtaataccccatctcataggagtttaaaaggattaaatagggaatgtagctatcatcttgtgcctggaattctgcaaagcatatgaaggtgcccttggaacttccttcccatttttcatatttgctctgccacctctacacccagccccgctttctgcaaccaattgtattataaccccctcccaaacacttagtgcatcctcccactcatgtaatttgtttaccttgttttctatttatttcttttgagatggggtctctgtcagccaggctggagtgctgttgcatgatctcaggtcactgcaacctctgcttcttgggctcaagtgatcctcttgcctcagcctcctgagtagctgggaccataggcacacaccatcatgcccagctaattttttgcatttttgttagaaacggtttcaccaggtttcccaggcttgtcttgaactcctgagtcaagtgattcgtgtgcctcagcttcccaaagtgctgggattacagatgtaagccaccgtgcttggccttaccttattttctaagaactgatgaccataagtaagttttggcacacaccactttgtatgcttcgtctctcatcccacatgtccgtggagataaacctcattgacatggaacctcagaggcagcttgcagaaggaataatacatcacaacaagatggcaacactctttaagagctgcatttccagtcctctggctttgtttcagtggggctgcttttaggttgattgaataactagcagcaacgatagcacctaaattattagttaatgaaagtctgtaatttgctaggcatgtgctaaccagtttacataaatcatctgaaagcctcacaataactttgaaaggctaggttttccctttcacagatgaagaagttgaatatttgatttatttattcattaaggaagagatttttaaataaaaataatttttttgtagagatggggattccctatgttccccagactggtctcgaactcctgggctcaagctatcctcctgcctcagccgccaaaaatgctgagattacaggtgtgagccaccatgcccaactaaggaacaaattttaatgggtgcttcttatgtgaaaaacatgggattagacactggggatagaaaaccgaatgacacatagtccttgctgttaggaaatatatggtctgttgggaaatctggcagatccacagacaattacaatcctgaggtaaaccttgggaagggttagaaaatacagaagatgggctgggtgcagtggctcacacctgtaatcctagcactttgagaggccaaggcaggcatattgcctgagctcaggagttcaaaaccagcctaggcaacacggtgaaaccctgtctctactaaaatacaaaaaattagccaggcgtggcagtgtgcacctgtagtcccagctactcaggaggctgaggcaggagaatcgcttgaaccctgaaggtggaggttgcagtgagccaagataacgccactgcattccagcctggatggcagagcaagactccatctccaaaaaaaaaaaaaaaaaaaaaccacggaatatgacacctgaccagactgaggtttgcataggaggtgaggatagaagctgtattagtccattttcacactactatgaagaaatacctgagactgggtaatttataaaggaaagaggtttaattgactcacagttctgcattgctagggaggcctcaggaaacttacaatcatggtagaaggcaaaagagaagcaggcaccttcttcacagggcagcaggacagggagtgcaagccagggaaatgccagacgtttataaaaccatcagatctcatgagactcactatcacgagaacagcgtgggggaaactgcccctatggtccaattacctccacctggtcccacccttgacacgtggggattatgggtattgggattacaattcaagataagattttgggtgtagacacagccaaaccaaatcagaagcctcaggtcttttcttaaacctagttaatctgaagtctgtcccctaccttccccaacccccacaccagattaacaaacctagagcaattcctccaaatctccataagtactttcctgccctcagttaactaagctagtaaataccaatgcccaaggaccatgtgaatcttaacaggaccctcccacagacaacatgtactgaagctgggaggaccatatagtttatcacaaaaatgaagacacttttgagactgaaaggggccctattaacaattattccaggataacaggtataaactaggtatgtcctagcaacctgggacacaggtttaggttaagtataacctaaaggaaggcctgtaacgaaaagactcaggctgaatgctaaccagtggggaaaacactgggggcagtagttccttgatgtccctcaatcctctccactaagcagtgacatgggcttaaatctggggcctactttccctaagctcagggaagcactgcctgacagtggatgtgggggtgggggatggttgctctagcaacaatcacagaggtccctttggaattgttaccagggtgaactcaccagccaggggaataccccagaaagagctgccagtaggaggagggccagcctcactggtgattggagtccagcagtcccactgattgggagtgctgagccaagcccatgtcgtgcttcgctgatgcatggctgggctgaagaaagagctctttgaatttttcatagaaaagactggtgcccaaaaggccagggctcgagaatgaggctgcctcaagcacagtgcttggcaggacaccagggctgaaaggtacagcaaagtcctcccagaatcgcttgtcagagcagggatttgcatcacagactggccactgcaaagacagatgggaactcacaggttttgtgtgtgtgtttgtggttcactgctgatggacgcatgtcagaagccacctgagccttggcccagccttcatgtggagtgaaaacccagacctgtgtgagcagcaggtacttgaagcaagagaagcaaggccgagcctccagggctttgtcagaggctccttccttcctggaatccaattgtacaaccaggagccagaggtcttggtggccggatgtgggtctaatcctggttccatggcctcccaactgagtgaatgagattataatgataaaatataatttactgtgtacccggcactgccctaagcactttgtgtttcttatctcatttactcttcacagaaactcttggtactattactatacttgatttctagagaagaaaactgcggcacaggatagagttggtttgccaaggtcaggacatacacctcactgtgtgaggttagaaactgagcactggacccccatcctacgctgcctgtttcatgaattgtaaaaggggggataaatgtagcacctcctccctaggttgttgtgatattcaagtgggataatccatttacagcatgggcatggtggctgcatgtgaaacagtgggagctactgtcagtttgattagttctggcctctctgcagccttgctactctctgtttattctcagcagccttcagacaattttcttttcttttctctttcttttcttttctttttttttttttttttttggagacgggagcctcattctgtcacccaggctggagtgcagtggcgcaatcccggttcaccgcaacctctgcttccctgttcaagcagttctcttgcctcagcttcctgagtagctgggattacaggtgcatgtgccaccacacctggctaatttttgtatttttagtagagactgggtttcaccatgttggccaggctggtctcgaacttctgacctcaagtgatccaccctcatggcctcccaaagtgctgggattataggcgtgagccaccacgtgcagcctattaagacaattttctgtttgaacttcacaggactttcagcttcttgggttgggacacattgtctatttgttgcgtgtgtggagaacagtggacagcaaagatcaaaacccttaggggagaggggcaagagagaggatatgagtggggattctctgctcccctgaacagtattccaggattccttcaccaattgaagttcaagtttggtcctctgagcaaaaagtttagagaagttcctttatgcgtttatttaaatttagaataaacatctctgtagcaataacaacaaagtgaacactcccggttttgttcttttcttattttttttgttttgtggctctcatgcacacatggaaaaacaacacaaaacaaaaccagatgaactgaaaccgtttctctatccaaggctcccatatgtaagaaaaggaaagattttttccttcttgggcagggttagatggtgttggtcggggggagttgggagggaatggttccaccatcctgttccaaagctccaattcccctccagtaccaaagctgagttatccaagagaagccccagggaaatttgctccctgtataccaaggggattcgtgaatctctcctcaaggtagagatcatcaaggatgtgcccagccactccatggagagaagctgctgctgctcacaaagaacattgcatggtggatttccaacttggaacttacatgtggggaggctctgggactccttcctttattccttttccagtcctattagtctcagatgcatgtttcctggtcactgagggagctgcaggcccaaggaccatatctgcttacacttacccacagtgtttcacttgctctagcctgaatgtcagcattccaggaccactgagggagggacagagcagagagggctgggtcaagtgggcagcttccaggaacaccccgggagacctgtgggtagctgggctgcactagagtctgggcacagcagctcttccgaactgcagacccactccctccctttagtattgtcctgtctctgtaggcttgaggattaaaggcatgaaaagagttcacaagccagtggcttaagacttctcttgatgttcccagacagctctgttcagaggcattagctgtcagagggaatattctgcaagatttgaagctgtggcatggtttgctcgtccaaccttctttactcccatatttggcctttgcagttgacaagtagagctggtttgccttcctccaaaaatgtccatggagaggagcaaagaagacctaggaacaatgaagggaaagggaaataaaaaaggggaaagccaataccaaagaaacgggttaggaaattttccaaggaaggttgatctgaatgaaaaaaaaatcacaagttttctttttagagcagataatgtatctccgtgtgtgtatatattacagcctcacttagaaatgccacagggggctgggtgcggtggctcactcctgtaatcccagtacttcgggaggctgaggagggtggatcaactgaggtcaggagatccagaccaacctggcctacctggtgaaaccccgtctctactaagaatacaaaaattagccaggcgtggtggtgtgtgcctgtagtctcagctactcgggaggctgaggcaggagaatcacttgaacccaagaggtggaagttgcagtgagctgagatcgcaccattgcgctcaaccctgggcgacacatcaactttcataaagccaggcaggtggaacttaacacttcctggtgaaaaggactttgtgggtgaggttcttggacagctgtcccagggaactcctgggagaaagatctggttcacccgagactggtggaaagcaacctgtgctaaaaacttgctttcagccaagaaagccaggatttggctaagagataagcgtgggcacgtttgacccttttgtgtctttcatttgatattaacatagctagacaagagggagaagggtgacctcaaagtgataaggtctgtttcctttagaactagaggacccaaagatctctttgttttgtttctgcctggaagacaagtagagctcattccagttctgtaaaaggtcaccaaataccctgcagtcttgttgtagtaactgtttctgtgaacttgcttcaaaggaagcaaacatactatttaatactgaccaaagacacctggggttgttttctgcttcttgttgtttgttgttttattttgcaagagcagataatgatcagtttagagtctggtttccctggtgccaaaaacaaaccctagtacctcctgtttctggctcaactgtccccagccgtctcaagtgatccagttggaacgcggagaacagagaacaactgacttccccttcccctgggtggtgcgttagagttctttcccagatgacacacagtatctgagactctgccatggaggaatccactctgtggggaccttctcctttccagtccccaacccgaatttcttcacaaagtagcaataattagttcctagggcacatggtgctttgcagtctgcacagctgaaatggctagtcacaagatggtttgtaattttaaatatacctgtgccccacccagatttcaacacattaggaattattccactcctacaacctggtgactgggaggaaggagagaagaggggtcaggattcaaaagagcagctgcagggctcagatctgctgtcccctgcctgctaataatagctcccattttagccagcgctcactctgccaggtatgtgctaagcacttctttgttgcctctgatccccgagacagctctggaagatgcaggtgattcctattttgattatggggaaactaaggctttgagagatggaggaatttgcctaaactcgcaaagccagtaaaaactggaagcgggtctgaacttccttctggttctcaagcactgcgcttttcattctcacactgtactgctgcttcaagctgatgaatttagcaagagtgggtaccaggaaatgccagtgagacaggaagggaacaactgccaaaatgccaaaccaaaaggggtttgaaacctgagagttggcagttcaccactgcaaaaccacggggctgcgtggaggtattcatgggacaccgagtggtatcactagcagcggactctgcatgcttacttagagcataaaaggatagcacccttggccattgcctgacatgaactcagtttggaaattgcagaggtgtggagagccatggatgggttttataatttattctaatgtaatctctgtgctaaaggctgtttgaaaaaaataatgaagttgatgttgcttaagttatatgcaaatgtaaactggtcttccttcaagatgtttggaatggaatgaatgcccttcccctgggtacctcccaatacctaccctcaaaagagctccagtaaggcttccttatctttccttgccctgcttcctacactgctgctgcaggtgtctctgggtgattgtgggggaaaccactgtggttaagcaccaacaccaagacatggcaccaagctatcttctccctcaccgtacagccaggcgggctgcttggtggatttggggtcaccctctccgtctgtctctccctgatagttacatttctcttccatcactgtgtgtttggcagtggatgaacctagagcattacatacattttttaaaatttatttttttctgttactgatctgaatgggtagatgaaaattacatacatttttaagagagcacttactatatgccaggcattgttctaagtcctgtacacatcttaactcttatcctcataaaatggcacaaagtgggtagcactattatctccatcttatagatgataaaaattggggcccacagaaattaagtaacttgcgcatgttacgcagctgatgagtaggaatctgggctgcttaatcctttgcttctcttccatagtggttctagcgtgagtcagagtgttcattcagacatctcttcctgggcatgctagccccatccatggttgggttgctgctgctataactggctcttggtggcaacactgaaattatatcaggttcccaggtgagcgtgttgctattttaggtggtcaaggataatatcgcagagtgctgttgatattctccacagggtggctctgaacgaatcatcttcctctgggacaccctcttcacttgctttgtatctgggcactgtgactcagtttctaaggttatcaactacgagtgctagatacatttggtggcgtcattgcctattcgtagaacatgccgtcagccatcctggaaaggcatacagcagaacaccataagaggagcagtatttggggtcactccccaaatgaccctgcaggaacatgccaattccagagcttaagagggaacttggagggagtgaggataataatagctaatgcttattaagcccttacaatatgccatctctgatctaagcacattctgggaactacctcatttaatcctcaccacaaccagctgatgcagatcctattactatcccccattggcagatgaagaaaatgaggcacaaagaggggacctgatttcccacaatcaccaggctcataaacgggatccaggattccaacacagccagcagcttcaaagattgggctcaaacatggtgctacaactggcccctgaacccatgtccttccctgtgctttattttggggagatgaggactttcagctatcttattgccatctcgttttcagccttgaaggagcccttagaaataaagtgaaaagaaaacctggcctgaaacaactgccaaatcccaattagggaacaaggttgggaggagagaggagggggcaggatctgaccaggttgtaattcagtaactgatgtctctaattgatcactgagaggaagaagcaggaatggccttctcagtcagcattcatggtggcaggagaatccaggatctgttccttgaccttcttgttctggaaatgagacttcagccctgttcatcctttggctcccacactacctactggactctccttgccacctgttgctgctgattgctcacccccatttctaagacactgacaggaaggaagggtgtctcccagctggcagcataggtttcattttagcatccgaaaagctgagcatcaccactccgattgctgttaattataacattagtactttattttggatgacgtttaaaaagttatgcaaaggccagacatggccaggcatggtggctcatgcctgtaatctcagcactttgggaggccgaggcaggcagatcacctgaggtcaggagttagataccagcctggccaacatggcgaaacccgtctctactaaaaatacatcccatagctgggtatgctggcacacacctgtaatcccagctacttgggaggctgaggcaggagaattgcttgaacctgggaggcggaggttgcagtgagccaagattatgccactgcactccagcttgggcaacagagtgaggctccatctcaaaaaaacgttatgcaaagatatttgcaaatattatatctgataagggattaatatccataatacataaggaactacaactcaacaacaacaaaaaatcgtattaaaaaatgggcaaagtatcctgcacgtgtaccactgaacttgaagtaaaagttggaaatatttttaaaaagggcaaagtagttgggtgtggtggtgcatgcctgtagtcccagctactcgggaggccaaggtgggaggatcacttgagcccaggaattcaaggttgtagcgatctatgatcatgccattgcactccagcctgggtgacagagtaagaccccatctctgaaaaaaacaatgggcaaataatttgaatagacctttcttcaaagaaggtatacaaatggccaataagcatatgaaaagatgtttaacttcactagtcaccagggaagttcaaatcaaaactacaaaacccattaggatgactgttatcaaaaaatgaaaaataacaagtattggcaaggatgtagagaaatcgaaacccttgtacattgctggtgaaaacgccacctggttacagccactgtgggaaacagtttggctattcttcaaaaaggtaaacagaattaccgtaagattcagcaattccacttctagctatatatccaaaagaattgaaagcaggtattcagaaattgtacatccatgttcatagcaacattattcaaaatagcttaaaggttattgagaaacaacccaaatgtccatcaatagataaatgggttgaccaagtgtgctatacacatagaacagaatattacttggccgtaaacaagaatgaagtcctgatacatgcgacaacatggatgaacattgaaaacatgctcagtgaaataagacggacacagaaacacaagttttgtatgattccacttgtatgagatacctagaataggcacattcataaagagagaaagtagaacggacacccgggaccagagggaaaggagaaatgggaaggtattgtttaatgggcatagagtctgtctgggataatgaacaagttttggaaatggataatggttgcacaacattgtgatgtagttaatgccaatggattgtacactttaaaatggttaaagtggtacattatgaacatttcactatagtttttaaaaatcaacaaaaaattttatgtaaaaagttctgtggggtttaatcttttagcagttcataaatccattaacatttgccacagctaccctacagagaggcatactatgtgaacaccacacttggctttctgagctggaactaaaaacaccattactctactccttggagtttccccagagtgagtctgtccacacgtggttgctattggaccctacctgttgctactgtatcactgtgctgtgttactaaggagtgtgacacgttctgactttcaaagcatttacacagtgaataataccacttttgtgctccttggtataaggccacatcttcaagtacttcagcatttaaaaaaaaaaagtgagcaaaggatttatctggctagagtttaaactccaatcattatttagtcagggacagagccaattgtagtgtttaaacagcattattatttagacagggacagagccaagtttacggaattctggaaggcaagcttaacctcggggtaccttagcagtgttctatgtgctggtcctgagcatttaatccagagcaaactggtgatccatttataacccaagttttctctgtaaactggaaataaaaagatggataaggcataactcctgctgtctgtcatggggttgaaagtctaacagaggcgtagaaataatgcgactagggtacaataagtgttaatcagcacatattcaaagtgtgttgggtgactggggtcagggtccagggcaaggtcacagagatgagatggcatttgagccacatcctgaaggaagaatggagttttccaggatgacaaaacacaaaacgaaggaatatgcatattccttttgcatatgcagaaggaactgcatatgcaaaacctcaaagcatggcaggatgggacacccagaaaaccacaagcagccgtgtgtgggtagagcaaaggcgagtaggagagtggcagatcctgaaaggacatagaaagaactgagattttgtcatagctcaatgggcaacatgggcaactgttgaagggttttaagtgtggaaggggcctggaggggcatgatcaggttttcatttcaaaaaagaaatttaagtctggtggatggatttgaagcttgggacaaggagactagtctgaagattgtcagaggaatccaggtgagaggtgaagaaagcccaggttccagagctatttcagaggcagcagagacaagaattgtaactatttcactagaatgaagttcaaaatgaggtcaccgttcctttcatcttggaattatagcaaggtgaagcccgcagagctgaagggcagctggttcctcctgtacccgcttcttgtggccaagccgcaggagcctcagccttgccatgggaatggggcctgtagctgctttttctctctccttcctcttctctagggcacccttactcagccttcctaaactatttgaagacatggcctttaaatttcctgttgtcttaatttattttttttttgactcagttttatggatacttcaaaaatcaagaaagaataagaagatagtaaagaatgttcctctcagccaccctgcatccatccatttcccaccccaacctgcaaaaggtaaccactggatgggcccggtggctcacacctgtaatcccagcatcttgggaggccaaggtgagcagatcacttgagcccaggagttcaagaccagcctaggtaacatggggaaaccccatctctacaaaaacaccaaaattagctggacgtggtggcgcatgcctgtagtctcagctactcgggaggccgtggtgggcggatctgttactagtctcttatgtatccttccagggatttttgtaaacctatagtcaagcaaatatgattttacgttcttcctttcccccttttatttccattctttcttggggacaggggtccttcttaggataaagttaggaagccccaggggaactcattcagacctaaggagtcagtcctagttgccgttgtctattagtaagcccttttcctctgcaataccttacagtctaagggccccaaacaaaaagccttccagtggggcaaggcctgattgccttaggaggccccacaatggccgaggcctccatctatccctggacctactgaagtaactgaggcacccatgctggcctgcaccagacagtgtgtgtgagacccttgaacacagtggaaatgcaggcatcactgaggcacccagcctcaggctgaggacagagtgcctgtgctgtaattagatgtgactcctccacagccaagagggcctacactctcagtgacgattcttccatgacattcaggcactttccccaggtacagccatggcagaagatggctgggcacaagggaccagctgcacgctgctcctggagtcagctctccaggacaggcctcaaccttgggcctcttcagaagcactgctcctatttcttgccagccgatctcagcccaagccacccaagtctgcacccccctgagtacagtggagatattacattaactttgaaataaaaggagagactctaggtctcactgctcccttccagaagcttcttttgcctcttgcaaacatgggtggctttgggaggagtgccagcacacttcatataccagaagcacctcagccctgaggtcttggggacatagataggttcttcatctcacgtgatggggactgagctctttttggtgggtaaagtggattgaaataaaggaggagggctgacaggaatttgagactagcctgggcaacaaagcaagaccgcatctctacaaaaaataaaataaggttgggtgtggtggctcatgcctgtaatcccaccactttgggaggccaaggcaggaggattgcttgagcccaggagttcaagactagcctgagcaacatggcaataccccatctctacaaaaaatacaaaaattagccgggcatggtggcgcgtgcctgtagtcttagctactcaggagactgaggcaggaggatcacctggacctgggaggtccaggttgcagtgagtaaaagaaaagaaaactgagacccatggaggttaagtaacttacttttaatcactgttacttatttttttctctttttttgagatggagtctcactctgtcgccaggctggaatgcagtggcgcgatctctgctcactgcaacctcagcctcctgggttccagcgattctcctgccttagcttcccaagtagctgggactacaggcgtgcaccaccaaacccagctattttttgtattcttagtagagacggggtttcaccatgttggccagcatggtctcaatctcttgacctcgtgatctgcccgccttggcctcccaaagtgctgggattacaggcatgagccactgtgcccagcccaatcactgttacttttaaggaaatccatttgactactaaggcataatgtcacagtggcttagacaaaataggagtttctctctcatgttagtctcatcatgagcagtccagggctgataagacagctgagtcttgttggggacccaggtttcttctttcttgttgctctgccttctctagggaataccctattccaccttgtcaaagatggagcaatgccacctctgcattccaatggaagaaatgggaggaagtggaagacacaaccttcccttttaagggcataacctggaagttgggctcatatttcaatggccagaatgtggtccaatggccatacccagttgcaaaagaatctgggaaatgtagtctgactggaaggtgactcatacagctaaaattcagggaagaaggcgagaatggataatggaaaacaaataggaatctctgtcacagtcagaagtcgaactgggattcaaacccaacagtttgacttcaaagccagaactcttaaccataatcttcattatgctgttgttttagaagaattaaatgaggtccacagttggtaaggtctttctctacagtttgagacttcattaacacatgtatgcacatacatttttgctaaatggatagattatagctgctcttgccataatattataacgcttactgtgaaagttgttcaacattgatggggaatcaagtaatgtttcctttttttttctttttttgtttttttgccttgagacaggtttttactctatcacctaggctggagtgcagtggtgcaatcttggctcattgcagccttgacctgctgggctcaagggatcctcccaccccagcctcccaagtagttgggactacaggtgtacgccacttgtagtcaaaaaataaaaatcaatttttaaaaactgatttgtagaggcagggtctctcactatgttgcccaggctggtctcaaactcctgggctcaggtgatcctcctgcttcccttcccaaaatgctaagaatacagacataagccactgccttttatcctcttctcatagactttccatttttagtatttttttgtgagtctttcttctttttcttctctttattctcctctccctccttttcatgcctcatactttatgatgcttggtatatgaggccatcatcagttttataatttttttctgcatcggattgtaggattgggcttggaaataactgccccaccaatgaactttctaacctttcacaagcaagtggggcaaaccagggtaacttcttttttttttttttttttttttttttgacacagtctcgccttgttgcccaggctggagtgcagtggtgtgacctcggctcactgcaacccctgcctccagggttcaagcaactctcctgccttagcctcctgagtagctgggattacaggagtgcgctaccatgcctggctaatttttgtatttttagtaagacatggtctctccatgttggccaggctggtcctgaactcctgacctcgtgatctacctctttggcctcccaaagtgctgggattacaggtgtgagccactgtgcccggccagataacctttaagaattcttagaagcccagaaataaagccaaacctatatggtcaactaatttttggcaagagtaacaagaagacacctgggaaaagaacagtatcttcaataaatggtactgagaaaacttgatttccacaggtaaaagaataaaattagactcttacaccacatgcaaaaatcaactcaaaatgcatgcaagacctaagcataagactggaaacaataaaactcctagaaaaaaacacaggagaaaagctccttgacattggccttggcaatgattattttgcatatcatagcaaaagctgaggctacaaaagtaaaaataagtgagactgcatcaaactaaaaagcttctgcacagcaaaggaaacaatcaccacaatgaaaaggcaacctacagattgggaaaaaaatatttgcaaaccatatatctggtaagttgttagtatccaaagcttacaaagaactcatacaactcaataacaagaaaacatataacccaatttttaaaatggacaaaggacctgaatagatatttcttcaaagaagacataaaaatggccaacaggtatataaaaataaaacatcaaaaccactatgaaatgtcacctcacatccatggatagctattatcaaaaagacaaaagataactgttggccagagtgtagagacaagggaacccttatgtgctgttggtgggagtgtagtttggtgcagccattatggagaacaatatggaggttcccaaagaaattaaaaatagaaccaccgtaggatccagcaatctcagtttatacccaaaggaaatgaaatcaccaccttgtaggctgggtggagtggctcacgcctgtaatcccagcactttgggaggccgaggcagacagatcacctgaggttgggagttagagaacaccctaaccaacatggagaaaccccgtctctactaaaaatacaaaattagccgggcatggtgggtaatcccagctactctggaggctgaggcaggagaatcgcttgaacccgggaggcgggccgagatggtgccattgcactctagcctgggcaacaagagtgaaactccatctcaaaaaaaaaaaaaaaaaaaaaaacaaaaacaccttgtaaagatatctgaactcctatgttctttgtgacattattcacaatagccaagatatggaagctacctaggtgcccatcagtggatgaatggataaagaaactgtggtgcatctatacaataatatgttattcagcctcaaaaaaggaggagattctgccatttgctacaaaatggatgaatctgggggacattatgctaagtgaaactagccatacacagaaagaaaaatattataggatctcacttatatgtggactctaaagaaaaaagtcaaattacagtgaaagagagtaaaacagtggttaccagaggcaggtagaggggagaacaggggagatgtaggtcaaagaatgcaagtagcaaacatgtaggatgaacaagtctggaaatctaatgtgcaacatgagttaataatagtgtatggcatttgggatttttgctaaatgaatagattatagctgctcttgccacaaaaagcggggggtaactgtgtgatgatggatatgttaatttgcctcactatagtaaccattttactgtttatatgtatctcataacatcatgctgtatacacacaaaataacattttttaaaaaaatacttagaaaatatgagaatatttaaaattaggatacatcaaacatcatgattttgccacaatttgatgattttcattaaaagaaaaattcatgtaatttgtaaccattttactgtttatatgtatctcataacatcatgctgtatactttaaatacacaaaataacattttttaaaaaaatacttagaaaatatgagaatatttaaaattaggatacatcaaacatcatggttttgccacaatttgatgattttcattaaaagaaaaattcatgtaatttgttcccacgtgttgtattttagggttgacataatagaacgctatcaaaattaggaagtttcataatgatccatgtatgtacaactgcactcgggtacccctgtcttctctcacctctgtaagagcaattttgtttgcatctctcaagactctggagacatgttttacaaaagcagtttgaagtgagtattcattcatttgggttttcctggtgtggccctttcagctctgcagaatgccacagcaatgaggaaactgtttgtttccaagcaggagatgccaatgtgatgacagactttttgaaagcatgtagctggtggctgttaaatctgcatttcctgccatgcataatggtccataagctgctggatgtgagcagagagttggttaataatcaagccttctttttcatagtgtttaacaatgcaaagtgcttttaaataattattttagctaatcttaacaataaccctatgagatcggtagggatatcctggcaacataagaacatattaaacgtcattctcataagacaaaggtctattttccccagtttagaacctaggtactctctgataagtagaatgcacacttaaattatattattttcaacaaatgtccattgagccccacctatgggccagtgggcactgcaagatgttggagagctgcagatgaacagatgaacaagacacagctgcttttctcaactccgtctctcaggagagagacatgaacaccactatcatcagatgctaaaagtgccataatcaatgtcttctgggaaaatgagggagaggagagaaggtttcagagagctgcagaggatgtttgtgctgataggattctgtctggcagtgaagtgaagggaggacattccagggaatgggtgcagcatataagggggcagaggcatggactacatgatttcttcagagaatgagaggggaaggaaggatgcattcgattagcagatggtggagagccttgtttgctgtgccaaaaggcttgaattagtcccacaaaccacggaggcagtaaagagcagatctagttaggtgtgaatccaaattccaagaacttgctgacttgggggagttgcttaatcatcatctgtaaaataggggttatactcaaccttctgggttagttttgataagcactttataagctggtgtatataaagtgcttggcacagtgcctagcacacagtaagtgttgactattaactactatccagtaatatttcctaatcttttttgaatcaggttcctttgagaatgaatgagtcctctcctcatatacagtattttgtatattatttaaggggattcacattatctcctgaaactggagtccaagataagagtcctgctgtgtcttctcaaaatttttttaactttatttttttttagagcagatttaggttcacagcaaaattaagaagatacagagatttaccttatattccccacccctattcatgtataacttccctgatgatatcaacatcccttaccagagtggtacacttgttacaactgatgaacccacattgatgcatcataataaccccaagtccatggtttaccttagggtttgtccttggtgttatatattctatgggtttagacaaatccataatgacacatacccatcattatagtatcatacagagtagtttcactgtcctaaaactctgcgctctcatctgaagttttctttctttctttctttctttctttctcgctttctttctttctctctctctctctctttctatctttcttcctctcttttttagagtctcactctgttgcccaggctagagtgcagtggcgtgatcttggctcactgtaacctccgtctcccaggttcaagcgattctcctgcctcagcctcctgagtagctgggattacaggaacccaccatcatacccagctaatttttgtatttttagtagagacgggatttcgccacgttggccaggctggtcttgaactcctgacctcaggtgatctgcccacctcggcctcccaaagttctgggattacaggtgtgagccaccacgcctgacctgaagctttctttttctttttttctttctttttttttttttttttttgagacagagtcttgctctgttgtccaggctggagtgcagtggtgtgatctcaactcactgcaacctccacctccagggctcaagcaattctactgcctcagcctcctgagtagctgggattacaggcacccaccaccacgcccggctaatttttgtatttttcatagagacagggtttcactatattggccaggctggtcttgaactcctgacctcaggtgatctgccttccttggcctcccaaagtgtggggattacaggggtaagccaatgcattcgtctttatgtgaaattttaaagcaggagagtgctaatatcaggttttattttttatttttgtggggagaaatactgggtattggagaaggacaccaactttggttctcaaattttttttttttttgagatggagtttcacacttgttgcccaggctggagtgcagtggtgtgatctcagctcactgcaacctccccttcctgggttcaagtgattctcctgcctcagcctcctaagtagctgggactacaggcgcccaccaccatggccagctaatttttgtatttttagtagagacggggtttcatcatgttggccaggctggtcttgaactcctgacttcaggcaatccgcctgcctcggactcccaaagtgctgggattacaggcgtgagccaccgcacctggctggttctcaaatctgactgtacattataattacctgtagtgattcttagaaaccctggtgcacccagcgtcactcttagatattctgattcagttggtcggggtcaggcagagcatcaggattttttacatcttccagggaattccaatgtatagccagttttaagaaccatttggctgtctccaatgttagacagccagagagaggagaagagcagaagacgaatggaaagaagaataaaggagaggaaagattcagaacactttggagatggaatcaatcagaccaagcacccaattacatgcagtgagggaaaacggtgtgaggtggtccaaaaggggaggaggtatttgtgttttgtttattgtttactactttttcttcactatgtaaaaaggaggagtgggcaagaagaaaataattcattcaacaaacatatacttaaaatacatgtattggccaggcatggtggctcacacctgaaatcccagcactttgggaggctgaggtgggcagatcacctgaggtcaggagtttgggaccagcctgaccaacacgatgaaacgccgtctctactaaaaatacaaaaattagcctggtgtggtggtgcatgcctgtaatcccagctacccaggaggctgaggcaggagaattgctggaacctgggaggtggaggctgcagtgagctgagatcgtgccactgcactccagcctgggcgacaggagcaagaccccatctcaaaaaataaaaataaaaataaaaataaataaataaaataaaatacacatattaagtgcaaactgtggatcgagattttgttttgggcatctttaacatgcctgtggaacatggacatggcacataggcacctgaaaataccagagcaattggaagtcaccaattcataactgggtgatcgtgaaagagtgtggatgagatcaccaggagagagtcgaggagagccaagagggtgatgaacatggggaatcatggaccacggaccccgggggactggggaggaaagcctttgtgtgggatggtgagggcgtgagagaaggaggcaagagtttccagaaggagtgggtggccagtgtgtgaaatgcagtagagagatggccagaggtgaaggccaacaggagcaggcccctcacttgatgattaggagagggctgtggcttttgagacagtggcagggatggaagccaaattccagtggctgcagatgaaaaagaaagtgaggaagcacaagcattgacataggaagtttggggaaaaagcaatgaaagcagtagcacagggaaggaagggtggaggacagagctttattttagactggagtggcattattgtagtctgaggggaaggagccaggctagaggaagccatgaaaaatacagaagagggaggagacgggcagtggagccagggctccgctgcggcaggcggcccggggctcacaaacactgggtgaggaattgctcttggatgggactagggatgcttgtttcttggaggctaaagtgaagaagtttccagaatgatgcaggcctgtccgagaagccacccagggtcatttctgattcccgtgacagcctcctgcctatattctcccacttcccaggactcaatctattttgtgctccccttgaatgctgcctccaccccaggacttgaggctggctggagagtgagatgggatagctgaggtttccatctctttcactgtcccagaagaaaagcatggggcctctttctgtttctagtttatggctaatcacaatgcatgaagaatccagctgcagctacaaagatttgtggattctcaaaaggtcttcagttattcttactcattctttcttccccttctcagagggttctctcctctgctccctggctctcttgtattgaccttgcttccagttattatacattgctggacatcccctcttcctgaaagtctttctcctctgagcattagtgacattcttctccaggttgtcttcttgtccactgtctcccctcctgtttctgacctctagatgtggaatgccaggattctgtcccatgctccttctcttccccaggtacacgctctcagaaggccattgtgtctagtccatcactttaaatttcatctctacactgagatgtcctgacctcctgctccaataccagcaccccccactgtgtgactgaaatttccatttggatttctcacagggatctcaaatttaacatgcccaaaacagaactcttgatatcttccccccctcaatctgcaccttcttctggttttccactctcagtatatactggcatttgttccctcagttgctgaactggaaactcaaggtcagattcttctcccttgcaaatgcaatctgtcagtaaatcctattgactctacctccaaaatgatttgaaatcagtccacttcttgcatctccagtctggtccaatgttactcaaagtggggtttacagaccagccacatcagcgtcaccagggaacttgttagcaatgtaaaatgttgaggtcctttccgtccagaatcagacactctggggatggcacccttcagagaattctgatgcctgcccaggtttgagaagcactactctggtagtgccctcataatctccagtccaagccactgcaatagcctccaactgctccccttactcacttacccactagaatctgctctccccctacagccagagtgattgtttttaaaaacagtatcagattatatcacacgtacgccctctatcccccagtttaagatctcccatggcctccattggacataacacaatccaagttctctttcctgacccatagagtcctgaggtgagatctgactacacctaccactccagcgtctgccaaaacctcccttcccccttcctctgggcttcagctcaacgggctttctcccacagtgcatcagcttgttcctgacttgggacttctgcactggctgttccctctgcctaaaatgctcttcccttgaacttcagttgctggttccctcatgtcattttctgctcagtgtaactggcaccccctttagaggggccttatgccaatgaacaaatccaaagcagctcctttttacaaaatatgcagttttaacctgtatagcacttactactatcaatttttacaaattttcttatttattatctaatgcaacatttttggtcttaagtttttttttttttttctttttttgagacagtgtctcactctgtcgctcaggctgaagtgcagtgcgtgatgatggctcatagcagcctcagcttctctgatcctcccaccttaccctcctgagtagctgggaccacaggtgcacactgccacgcctggctaatttttgtaattttttttgatagagacgaggttttgccatgttgcccaggctggtcttgaactcctggcctcaagcaatctgttcatgtcggcctcctaaagtgctgggatcatgtgcgtgagccaccacacctggccattaatgtacgttttatgagacctgatttatcttgttcattgctgtgtccaagtgcctgaacagtgcctagcacatagatgctccctaaatatttgttgaatgaatgaacttcacttcttccttacttgtaggcctgaagttgctattaagaaataataattcaggctgggcgcagtggctcatgcctgtaatcctagcactttcagaggctgaggaggatggattgcccgagttcaggagtttgagaccagcctgggcaacatggcaaaaccccatctctactaaaaatacaaaaaaattagctgggcgtggtggggcgtgcctgtaatcccagctactcaggaggctgagacatgagaattgcttgaacccaggaggcggaggttgcagtgagccgagatcgtgccattgcactccagcctgggtgacagagcaagaccctcaaaaaaaaaaaaaagaaaagaaataataattcatgaactagtgtttgctcaaatggttactcactcctctcatgtggctgcatttctggaagcctccagccagtgtcagtctcatctcggaggccggggtccacatattagtgtagtccccttacagcacatctcaaaaggaggcaggaacgtgagaagacattaccctgaaaagatggcaggagtgcgaaaggacactagtgggctactttcttagaactttagggagaaaatccgtgaatgatacctgagggcctctatttttgttgttgttgagtggtaggcaaagttgcctatttttttttttttttttttgagatggagtttcactctgtcgcccaagctggagggcagtggtgcaatctcggctcactacaacctctgcctcccaggttcaaataattctcctgcctcagcctcctgagtagctgggattactggcgcttgccaccatgcctggctaatttttgtatttttagtagaggcaaggtttcactatgtcggccaagcttgtcttgaactcctgatctcaagtgatccacccaccgcagcctcccaaagggattacaggtgtgagccattgcgcctggccaaagttgcctaatttttaagaaaattgtctttatggtcatagaagcctgggtttaagtcctggctctgccacttattgctgtgaaaccttgggcaaatcacttaaacacagtaagtcttaatgtcctcatttgtacaccaggggtgagaacagtacctacaacacaggaccgttgacaggctaaatgagacacctacaacgtatctggcaatggcaagccaccgcctgagtgtcagctattattgttattattttataatgagagagagagaagggtgactagcaccgagggctcaaaaaaacaaaaaacgaaaaaaaggctgggtgcggtggctaacgcctgtgatcctagccttttttgagaccgtggaggcaggtgaattgctcgagctcagaagttcgagaccagctgggcgagatagtgaaatcccatctctacaaaaagcacaaaaattagccaggcatagtggtatgcacctgtagtcccagctacttggaaggctgaggtgaggtgagaggatggcttgggcctgggaggcggaggttacaatgagccaagatcatgccactgcactctggcctgggtgatagagccagaccttatctcggggggcggggggtggggaaggcacagctatacacaataataagagaaacacaagctagaagtgcataaaaatgtcattcttcatcttccaaattggcagagcctagaagttggctgacactgttggtggaacacagggaagctggtgggagggtaaattggtacaacctgctccacggagagaactttggcaactgctaagaaaattacaaataaacatgtcctttggcccagtcagtccacttccaggaatttatgccacagatatcctggcacatatgcaaaataaggtaggttcaggttatttatttcagcactgtttgcttaacaaaatattggaagcaacctaaatatccatgagtagagaaaggttaaataaatcatggtctatttatacaatgcaacaaataaaatgaaaaacttcctgtatatactgatgtggaacactttcccaaattgattgttacatgaaaaatgcaaggtgcaggattgtatgtatagcaggatataacagaaagcaggttgtggaaaaaaaatatatacctgtatgcatgtgtcttttgttttgttttgttttgttttgtctgagatggagtcttgctattgtccgcccaggctggagtgcaatgacgcaatctcggctcactgcaacctccacctcccaggttccagcaattctcctgcctcagcctcccgagtagctaggattacaggcaccccgccaccacacccagctaatttttgtattttttagtagagacggggtttcaccatcttggccaggctggtctcgaactcctgaccttgtgatccgcccgccttggctgcccaaagtgctgggattacaggtgtgagccaccgcgccagcccatgtgtctttttatataaccagaagacctctgaaagggcagagtagaggaaaagtttttttgtacactcttttgtagttcttgaaatttgagccatgtgaatgtattatctgtttaaaaaaaaaggtgaagattttaattttttaaaacttgtgagtactaatgctcaatgcttcttacctgttacgtgatgattggttctaggaatggtggatggtaaatctctctcaatgacagcaaatgtcaaatacaaaagcaatgataacaaaggtactaaagacccagacattctttgggttctgtgcttgatgatgtaattgttggcttgcaagggagttgttcacgaggagataataacctggttatgcccaacggaatctgtatcaatcggcagagaatgttctgtatttctcccaagtttttgaaaacaatttttttctttttcatttcttccagcataaaaatgcatagttaacatgcatttggatgtcaactgtgagccatatggatttaactgtgctttttttggaaagaagcaagagggagagtggatatacattttcttcacgtttcttctgccttctatttagctagcaattttgtgagagaacctctaagcacagcttagaggaatgtgaagttggcctcccagtgggcactacttctctgttttgagagtttctctgcatggcaagccctcctatactcctgccaaacactaccagtctccaacttccttactacacattgcaaaattttatgcaggttttttcccccttccttctgatttgtttctaatcccctaactccctgcaagtctagttgccctgggtccttctaagactccatggaagtaaatgggtgttaatattattaattgattacttcattccataaacatttactaagtccctagtatgtgtctggcaccatgtcagtgctggaaacttgaaaaagaatgagaaatgattctgaatttaaggcacttacagttgttttggagagacagaaataaagtacagcgtgggaagtacgtgggtgctatgtgagcaccagaaaggggcacctaacccagctttcgtgggagagtgggataggaagggattcctggggaagcaaggcgtgaggaaaggcttaaaggataagtggaagttaaccagggaaggtggggtgagggggatgagcggggttggatattggaggtaaggactacctgtgtgagagtgagaaggagccttctgtgtgataggaggggtacggtttcagcaagagcgaaggcttagaggtgagaaaacaccccaggggtatgtgtgttcacgcagtttaactaggatgtgatgtgtgcagcaggaaatggcagtaaatgaggaaaggaggacgttattgagaacatcaagtgcaacagaggggcagaaacacagggctgaagatactaacaagtaataggtcatgggtgaccttgatgaagtggtttctcaggagtggtagggcctgagacaggatctggtatattgaggagtgaaagggaggtgagcctacactcagatgatagttaacatttacaaaccactttctatatgacaaggctctaatgcattcatttctcacaacagcctgagaggtagacattatccacagccttattttacagatgaggaaactgaggcacagaaaggttaagcaacttgccaaaggtcatgcaggtagaagtggcagaactgagaccttaaggctccagaaaccaaactcctgaccagtaagaaactgggattccagaaatgcagccattgctagagagtgactcaaggctactggagattgtagcacatttatagacacaaagaaaggtgcctggagacatgcggagagtgatgtctgacagagcaaggtccaggaggataaggctgagccctggatttgacaacgagaaaatcactggtgacttctcagatagcagtttcagcagcagctggggacaagccagatgaaccagaatgaggggaaaaagggcttaagagccaccatttaagcacaaggggtggcaatgcccgagggttggatggagacagccccatccagaggcagcagaaagggagtgcattagtcagggttccccagaaaaaatataggagtgtgtgtgtgtgtgtgtgtgtgtgtgtgtgtgtgtgtgtgtgtttatggagagagagagagacagagagagagatttattataaggaattggctcaagtggttatagaggctgacaagttctaaggtctgcagttggcaagctggagacccgggagaattgatgatgtagctccagtctcaatgttagcaggcttgagacctaagaagagttgatgtttcagaatgagttcgaaggcaggaaaaaaatccagcatccaagttggaagacaggcaggaggagttccatgcaggccttcaattgattggatgaggccaacccacattagggaggacaattggctgtactcagtctaccaattccaagactattttctttttttccctttttttcctctgcatttttgctctgctttatcaaatgttgatttcatccagaaacatactcacaaacacacccagaatgatgtttgatcaaatatcttgtcgccctatggcccagttaagtttatatctaaaatgaatcatcacagggagataaggccaagtatgactgcagataaatctgttttggaacacagaaagttcagaagaggacagacttttgccctctcctaataacatatatgcatcaaactagaaacgatctttctttttttctttctttcttttccttccctcccttcctccctccctccctccctccctccctccttccttccttccttccttctttccttccttccttcctccctccctccctccttccctccttcccttctttttgacagggtctcattctgttgcccaggctggagtgcagtggcatgatctcggctcactgccaactccacctcccaggttcaagcaattctcctgcctcagcctcttgagtagctgggattacaggcgtgcaccaccacggccagttaatttgtgtatttttagtagagacggggtttcaccatgttagccaggctggtcttgaactcctgacctcaagtgatccacccgtctcagcctcccaaagagctgggattacaagcatgagccacggcacccagcctagaaacaatttcttaaaccaacttcagctggatccctgaggtcagggtgacgttttccatttctcaaatgtctttgaaagggtggaggctgagctttcaatagtaattattatttataacttttattattatccaaaaaagtgccagttttgtgattggcatttaaaaacactgagttatgttctgatgatgacagactcttgctaaccatatggttaccttgtatcagttaccgagatacacatgttcagccctgctaaatgtcctggcccttgaaccttttcacagacagtgcgtgagtgaggctgggcggttcagtgacctgggcggttcaggagtctgtcgctcagccaggaagtttcacagccagaatttaaacgtacatctgttagactctaaaaccaatagcctcaccactatgcaagcacactcgtaatccagtatgtccaccaaatttcattctaaactatcttaaaggagaaattttactttgagacagggtctcgctctgttccccaggctagagtgcagtggcgggatattggctcactgcaacctccgccttcagggctcaagcaatactcccacctcagcctctcaagtagctgggactataggtgcacaccaccatgactaatttttttttcttttctttttttttttttttttgagacagagtctcactctgtcgcccaggctgaagtacaatggtgcgatctcggctcactgcaacctccgcctcccaggttcaagcaattctcctgcctcagcctcccgagtagctggaattacaagcatacgtcaccatgcccagctaattttttttgtatttttagtagagacagggtttcaccattttggccaggctggcctcgaactcctgtgatctgcccaccccggcctcccaaagtgctgggattacaggcatgagccactgtgcccggcccctgactcatttttttatttttatttttgtagaaacaaggtctcactatattgcccaggctgagaaatttatttatttatttatttatttatttatttatttatttatttattgagatagagtctcagtctgtcacccaggctggagtgcaatggcacaatctcagctcactgcaacctccacctcctgggttcaagcgattctcctgcctcagccttctcagtagttgggactacaggcgcctgccaccacaccgaggttatttttatttttatttttattttttgtatttttagtagagactggatttcactgtgttagccaggatggagaaattttaaatgaagggtttgcaaggctctccaagaaaacagacaggcattatttattatttcccaaagcttttgcttcaaaatacatacaacatcttatttttttaatttaggaaatttttattaacaaaattcaaatttgagggggtttttgttttttgctgtcaataagtttattgtctttatctgaaaaatcctcacagaaagttgtttgatttagctctcagcagcccactcctgagctctgaggaatcttgccctcttttgagctaccctttcttccaagcaagggacattttgggacggttccacctcttctttttaacttctttcttgggcttcttctcatagaccggattctttcgtatagtagcatgacctttcttatacatctcctccatcatgtctgaagttacgctgttctttatgtattgagagagctgtttcttgtaagcatcttcatcttcctccattaagtagcacatgtactgcaacattctggcccttgatgtacttccggtgtatttctgcattaaattccttgctttcagaatcataaccagggaatcatttggtactgtgagggacagacaagcctccatccacagctcccttcagggtgccgaaaactttattgccagtggtagttctggcaaggcctgcatccaaatagcaggttaaggtgcctggctgtccatcagtgctttccacattgtattcatctccagtcacctccacttggccttcatagatcttgtccatgccaaacctattgagaagcctgcaggccaacagcaggctagtacaatatgctgcagcatcatttgtcaggccaaccttcacaccatattttggcagtttgtgtacatatgctccagactattatatccccttctatgcaggcataagcaatctgacaaatgatatatctgttacacgaactatcaacgtgtatttgggtgtgttgtatttatttttattctgtatcaccaagcgtttgtgagcatagtaatcagttttaccctctagttgtcttctgaatttcatttggtatctcttaaagtaggccttattcttaacaacttgaacaacaaactccatcctgtggaacagagacccgcatccgctgctcaacagagaccttgcaggcccagcagtgctgggggcagaaaaggcacaaaattcaaatgtttatttcaaataaatttaaagagggaaagaaatatccaccaaaatgttacctccggaattagctgtcacacttctctgtttcccctgagactgtctataggcatatacagtgtgtatgtgtatatatgtttgtgcagatatatttctttacataaagagcatcactgggtacctatgcacacataaaaatataattttaacaccattttgatggctacctgaaatacttttataacagacttgtctatgccataagttcttgggaaaacaaataatcataatatcaattgatataagaatatttgtcagtttacttaataaatgctaggaggaagtctgttaaaatttttttgtaatttgtattggagtgccttcactgtttaatatagactggagggtggtagagcatacaggtgaagtgtacaggctgaggcttaaatctcagctcccagttccccatttgctgtgtgaccttgagcaagtcgcttatcctctctgtgccttggttttctaatctatataaaggggaataatagaacttaaaagagttagtccatgtaaagtgctttagatcagtgcctggctcctggtaacaattagtttgtgttacaagatatattcatctgtactctataaacattcaagttgctgagtcacttagtccaagaaaaccccaaggcagtttgacacagctgaggcggttgtaggggaatttttcaggctgatttctggggtgggaacttggagtctgtatttttacagaactcttcaggtaagtgactcttaaggtcagccgggcttatgaaccactgggtgagaacactgggcacagttagacagcagttgggtggtgggcgagactggaaagattcagaacagtgagtttgagacggcccgcccagacacagtggccctttgtaagcagcaaagcagggtgatatgatatttaaaactggaactttgtcagctgagagtcagttgagataaagaaggccaaagcaacaaaaaggtggaagaaacccacagatagagtaggtttctctctgaagttaccgagtagtttgtgcgggaatattttttcttctttttgttccatttggttttgtgtatcttatttttaaaagcatgcagagatacattttttcctccttgtgataacagctaatgtttacttagtgtgtgtcatggctgtgctagcagtttttaagctttcttcatgtaatcttccagacagctgtatgaagcatgttctattgttcccactttaaaaggaaaaaactaaaatttggagacgttaaataacttacataaggcccatatccatttttcctttcttcttttgtaacggaatttcagctttatttggagtgttcacatccagtgaaaataaatttcccagtacctctgacagctatgtgtggccatgcgactaagttgtagccaaagagatgcaaataaaagaactatctagggccccgtgggaaggtttcttatagggtattgatttggctgtgaggtatgtccctatttacccttctcccatcctactttctggtgcctacaatgcagatgtgagctttggcagccatcttggactttgaggatataaagcatgtattcaatggtggtagaggggtggaggaagacagcgcttctgcccccagtgaccaaggagctgctataccagccctgggctgcctacctccgacttcttttatttgaaagatatataaacattttggtttttttttttttttttttttttgagacagagtttcacttttttgcccaggctggagtgcaatggcttgatcttggctcactgcaacctctgcctcctgggttcaagcgattctcctgcctcagcctttcaaatagctgggattacaggcacttgccaccatgcccagctaattttatacttttaatagagatgaggtttcaccatgttgaccaggctggtctctaactcctaacctcaggtgatctgcccacgtctgcctccaaagtgctgggattacagtgagccaccgcacctggcccctgaaagatatataaacttttatcttgttgaagttgctcttatcaacatacaaatatgatccaaaccataatactggcttatgcttatattacttatactttatcaaaggtaactatatgctagacacttttcttgtgatttctacatactgactcattcagtcctcataacagccctatgtgtacatgcggttattattcccattttgcaaacgggaaattgaagcaaagagaggttatgtggcttgcccaaggtcacatagctagcagtgacagagccaacaacacacagctaataaggccaggtgcggtggcttacacctgtaatcccagctttttgggaggctgaggcgggcggatcacatgaggtcaggagttcgagaccagcctggccaacacagcaaaaccctgtctctactaaaaaataaacaaattagccgggcatggtggcacaggcctgtaatctcagcactttgggaagctgaggtgggtggatcacttaaggtcaggagttcaagatcagcctggctaacatagtgaaaccccatctcttttttagtacttttttgtaaaaaatacaaagaaattagccgggtgtaggggtgcctgcctgtaatcccagctacgtgggaggctgaggcaggagaatcacttgaatctgggaggtggaggttgcagtgagccgagatcaccccactgcactccagcctggactcggtctcaaaaaaagccaaaatacaaaaaaccaaaaagtaaaaaatgaaaaataaacccatactcagtatgaatgtggtatgttttgtggctttccttacctaaaccttaccttctgctttaatttataaaatggaggactcctagctggttgccatgagaaggaaaccatagtctctcccgaagattaaaacagcctcattagggtccaccttaaagccctaattccttagtgaaacctccaaaataaatgtcatggatgcgttctaaagttaattattttaaaaagcatccatggaatctcacttgccattgttttcattagaacattgttttgcttttcttttatcaagcaggactctttaataaacagaattgagccatctagctgtctgtccattcaacaaacagtaagcacctgccagagccagccactctcccaggtgctgggatgcagcagcaatgaatagacatcacagaattgacattccagacacgggaggcaggtaattaacaaatcaacacacaagaaaagatcacgtgcaaacaagtgctacaaagagaagaggaatgtggtagaggcttccttaggaaggtttcactgaggagaagatatctgagctgatgcttggaggcaagaaggaagcatcttccagagtgagggaacggtgattccctggggtcagaataagcatggcttgcttaagggacagacagaaaccccatgtgacagaaacatgagcatggaagattggcatgagatgaggtcagaaagttaggtggtgccaggtcataccatacatcaaggccagttttgggacttttactctgagaggggaagctattggatggttttaggcaacatactggataattaccaccctgggcattgaaaagcccttcttatttttgggaatcacaaaacttgtggcatatcaggcatcagttccactattgaagctacaacttagaaatgaatagaaaagatggtttctctccccctccccctggcacttagagcaacgtcaatcagatagatgctcctacctgggactttgaatcatgaggtcatcttccaagacgtaaggtcagttagaaattaatagggtggctccccatccgggagggaggtgggggtcagcccccgccaggccagccgccccgtccgggagggaggttggggggtcagccccccgcccggccagctgccccgtccaggagggaggtgggggggtcagccccccgcccggccagccgccccgtccgggaggtgaggggcacctctgccgggccgcccctagtgggaagtgaggagcccctctgcccggccagccgccccgtccgggagggaggtggggggggtcaggccccccccggcccggccagccgccccgcccgggaggtgaggggcgcctctgcccggccgcccctactgggaagtgaggaccccctctgcccggccaccaacccgtctgggaggtgtacccaacagctcattgagaacgggccatgatgacaatggcggttttgtggaatagaaaggggggaaagatggggaaaagattgagaaatcggatggttgccatgtctgtgtagaaagaggtagacatgggagacttttcattttgttctgtactaagaaaaattcttatcctgttgatctgtgaccttacccccaaccctgtgctctctgaaacatgtgctgtgtccactcagggttaaatggattaagggcggtgcaagatgtgctttgttaaacagatgcttgaaggcagcatgctccttaagagtcatcaccactccctaatctcaagtacccagggacacaaacactgcggaaggccacagggtcctctgcctaggaaaaccagagacctttgttcacttgtttatctgctgaccttccctccactattgtcctatgaccctgccaaatccccctctgcgagaaacacccaagaatgatcaataaaaataaataaataaataaattaaaaaaaaaaaaaagaaattaatagggtggctgtggtggggtcaggagcgcccaggaatgagtgtgccgtggcagcagagtccagcatatggcaaccaatgtccactgacacctggctgcccgtatgtctcctgtggtatggtatcagtggcatagcaagccgtgctgggagctttgctgtgacagccttacttggtaccttgttctccagtcttcctcttgattctctgagctccctagtcactttcaataaatccctcctctgtttaaacattagccagaagttgttgtttgaaacccagcaccttgactagtacagcgggggagtgagccacattttcaaaagataactggtaaatggaaaatggatttcaaaagtctgctaaatggaaaatggtttaaaagggttatcagccattggccagtcagaaacagaagacactgtaggtatttcagtaaatataaagaattggtttcacaggcattagagggctgaaagagtaaaaggaaaaaggaagaggctaggtaacctagggattaataactgcaggaagcagctctcgctcccaaggctgaccaacaggagggaacaggtggagttgcctgtactgaggagcttggaggaggggccccacggggctggtgcttggatttctgaggacagctctgcctggctcagatctcggatgagggggttgctgtctggctggtgtttccaccaaaggggcgtggctctgcaggtgctcagacctccctggggtgcagcccagcaggtgagggggtgtggcatggctgctgctggcacctggggcttgaggggaggcacagcaaggttggtactgagaatactcagaagctggagctagggccagttatgtgctgctactgaagtaaaattgaaaacaggaagtggaaaacaaggtagaagtcccttcttttcttctgctttgtgatctccttctaatgcctcagattggaaaacctaacaggaagccagctagctgggaggtggagagatttcgtttgcatcatcccaaccccaggattacagagaagagcatagaaagatatcttggagatcacagataaatcgccagcacagacaacatcatgtccagttaggaggccatggcagtagcccaggagagagaagatgatggcccagacatttggtcaggtattctgggggtgtatgggagggtgttttgggtggaaattaactttttttttttgagacaaggtctggctctgtcacccagactagagtgcagtggcatgatattggctcactgcaaccttcgcctgctggtttcaagtgatcctcctgcctcagccttctgaataggtgggattaccggtgcacatcaccatgcctggctaatttttgtatttttttgtagagacagggtttcaccatgttgaccaggctggtggaactcctgagctcaagcaatcctcctgccttggcctcccaaagtgctgggattacaggagtgagccaccacgcccggcctgagatgaacatttgaattggtagatggagtaaagcagactcccccttaccaatacgaatggatgttatccgatcagctaaggtctgaatagaacaaaaaggctgaccctcccacgagcaagagagaactcctcctgcctgtcttcaagctgggacattggctttttttcttgttttcagactggaactgaaatgctggtttgtcctgcgtctctagcctgccagcgttcagactcaaaccacacttttggctctcttgggtctccagcttgctgactacagatttggggattcaacaaccttcataatcatgtgggccaactccttataacaaataaataaatatagatatgaacatagatcctattggttttgattctctggagaatcctgactaatataagtgccttatgagacaggcagggcaggtttatctccagaaagaagcaaatatggcagtttggaagcctccataagaggacaaaaatgaaaatgtaggacttcactcattcctttgcgtcatcatctgtttaaaccacattttcctctgtttatgtaactctcaatagtgacagggtttcccatgctcttttttctgcttctttccacaacggcatctacccactcacccgggtaagaccttgaaatgccctttcttttctcccccatctaagttgttgccaaacttccaaaatagctctttagtctgttcttttccatatttccccacaatttgggccttactcttttcttccctggagtacactcatagtgcgtgattacacatttgtgggactgttcattaagttgctctcccacaccagacttgaggttccaaaacctcactattgtgactccagctcttgtcacacacacagaggtctcaaaaagtctgttgttgaattaaccagactgcctatctctagtctcttactccctctaatcatactgcccaagagtgactaaatatgcaaatctgaactttccatttctctgcctgagagctcccttcagtccagcagaggtggtgagctggaggcccttgactgcatctaaaggtgttttgtttagccccctcagtggttttgttttttgttgttgttgttgtcgttgtttttggaataattgccaacttaaaaaatctgggcctgtcttataaatattgggaattccagcttttcttgacgatttcgaagatttgctaaccctgggtctgtacccttccatggcaacaactggcagaagctggttgaccgttacttcctttagttgggaatagactcagtttgacagatttgcttcaatcccagcagggccttcttcattcccttacttatccttcagtcctgaactccagggtcatgggaatcaagtttacatgtctgatcatggctgctagggccttccatcatctcatcctgcttacagtgcctcctgggctctagagccatgtagattatttacaggagacagtgcttcttctcacctctgtgctttggtcctgaaaagtctaggatgcccttctgatgaatggccacacctcataatccccctggggactcctcttaagcctacaggacttagcttggttcatatcctctgggaagatttcctccttggcagtagtcatgctcttctttttttttttttttttttttgagaaagggtctcactatgttgctcaggctggagtgcagtggcacaatcacagctcgttgcagcctccaactcctgggctcaagcaatcctcccatctcagcctcctgagtagttgggaccataggtatgcaccattacacccggctaatttttaaaaaatttttttagagacacagtcttgctaggttgcctagtctggtcttaaagtcatagtctcaagcaatccacctccctcagcctcccaaattgctaggattataggcatgagccaccgtgcccagccattcctcttcctaatgtactattcactttgttttggaattacttgtaaccatatgacccccctcaccagattaaagtaccaataaaatcacattctttttgagtgttaaataaattggtaacagcctcctttcgccaatttgtggaaactctagtggctcacattagagaactagaactggaaattctcaccagtttccagtaggcccctgttttccactgtggttgattctgttactactctacagtgctggtattaaaagttggttttgtagtccagtatgtgcttgtctgctgctgctgagatgacagtctttcaagttaatattcctcaccggccaagaggtcctcggggggaaggtgatcccatgccctcagtgttgtcttgttagaaatctttccctctttggctctttaacttacaatcttatgatcattcttttccccaaagcccactttcacaccaggatgactgggacgtgaggggcttcccagggacttctcctttgctcctagtgagttcttctctagagcctttttctcttttctcaccaggggacctcagttgggactgccccatttatcagaggagttatataaacctcaaaagggagagggttccaggtctccattcctcccctcccaggaagcttcttgtcctctatgcaaaattatccacattctccccaacagaccagctctgtacactgggaccaggttttctcacactgcaaatactctgtcccctctttctcccaggtaatgggtgcctccttctctatatttatacaatgtagataagccatcctggtgattcttctccaaagacttcttccaaggtaactagtgttttctatttggaaagtaggctctggcaactgtgaataggacagcttttcctaataataattttctaagctgcatcttgtcttaggtggggttccctgtaaaatggactcagagatggagatttatatgcagatgggatgttttggagtgtgttctcaggaacaacacctataagggagtgagagaagcagaactgggtaaaggaagagttgaactgtggtgcagttgcagcagaggcctcagctgactgggtaacctttcagtgtttactccagttgagacaaggagactggccttggtactccctcaatggccagtcattggccagtcattggatgcagactgccccaattccaggaaggggcattaaccttggggaagacagctcccttcagccaagggcaattcctggggatggactcatctgagtctttaatgggcaactctgcatagggaggaagagtgtctccatcttgaagcggtgatctgggcagtgcaccacagtgtccactatagacctatctagacataatctgttcatagctctgtctcctccactgtactctaagcaccttgctatggactgaatgtttgtatcctcccaaaattcttatattgaagtcctaatctccggtgtgatagtatttggaggtggggcctttgggaggtaattaggtcatgagggttgtattagcccattttcactctgctataaagaaatacctgagactggataatttattttatttatttttaatacataaataaaataaaattttattttccctctatttcccaggctggagtgcagtggtataatctcggctcattccaacctccgcctcccaggctcaagcaattctcatgcctcagcctcccgagtagctgggattacaggtgtgcaccaccatgcctggctaattttttgtgtttttagtagagatggggtttcaccatgttggccaggctggtcttgaactcctggcctcaagttgatttgcccacctccacctcccagagtgctgggattacaggtgtgaggcaccacccccggctgagactgggtaatttataaaggaaagaggtttaattgactcacagttctgcatggctggggaggcatcaggaaacttacaatcatggcagaacgagaagcaggcaccttcttcacaaggcagcaggagagagagcttgcatgtgaagtgggaggagccccttataaaaccatcagatctcatgagaactcactcactgtcacgagaacagcatgggggaaaccgtccccattatccaatcacttccctttctcgacacgtggagattacaggtctctcccttgacatgtggggatttcaattcgagatgagatttgggtagggacacaggaccaaaccatatcaagtgtggtatccccatgatgggatcagacactgaatttgccatgatctcatcctgccagcacctggatcttagacttcctagactccaggcctgtgagaaatgaatgtctattgtttaaaacaccaaatccatggtatttcattatagcagcctgagcaaactaagacacatcatgagggcagaagctaggaatgtccaacagagtgcctggaatagagtatccactcagttggtagacaagagatgaatgaataaatgcatgtatgaaagagtaaatataagcccaacaacactgtcattattatcgtttgcatttatgcagagctttatatatgcaaattactctgctaaaatatgttataaatatgtaagtgctctaagcaataattcttaataaaacctgccatcaaaatgaattaatatttagtaggcacaaactaggagcacgaaccctgtattagtcaactctccaagaatgcatctctcttcataatagaactatttggaggtttcagagccggcatcctaactcatctcttaaattgctttttatgccccctacattgttaaataaatctcctttccttgtgcccaaatcctgttttcgtgatatagtgtttcgaaagtctactgagcattttattctgctaccaaactgtttgatcttacctctttttgcatctcttctgatgtttgtaattttcttgctggtagtccgatttctcatggacacttatagttttgactattcagaacagcaactcccttctgagaaaggctccatcaaaaccccatgtgaccctagtatgtggggaaggtgacatcatagaacctcacccccaggaccacagtgattggcccatggttgagcacatgacccaagctggaccaatcatggttcttccctccaaaaggttttacttgggaaaaacaggaaaataagttgggaaagaagagggcttttttccccactctgtgaagttgcttgcttggctggaagtccagagctatcagaggccatcccttaccccgtgaaggagctgtcttgcaatagaagaagcagcccacccaaggagagaaacagggtgagaagtgggagggtcctgagagctttcaaattcctgatttcaggagctgaaatctcagagattctctgtttcctgacctcccaaggctcagctgtcaaattcacccttcattctggaagccacctcagcctgctgccaaaaatctcccttttgagctgggtgcaatggttcatgcctgtaatcccagctacatgggagaccaaggtgggaggatctcttgaactcaggggtttgagaccagcctgggcaatatagtgagacctcaatctcaaaaaataaaaccaaaaattcccttttagcttaagtttaaactaatgtttaagttgtgtttctgttatttcttatccagagaatcctcctgtacacccccctcaactccacatacatttgctaggatcactgtagaattcattggatttaagcagcaatctgaatactaaacatgtaaactttaaatcattgaagcaggcaactctccatgaggtgataaaagatagggttgaagattttcagctcaagagccttgggttcaaattctaccttcatcaccgactagctaagcgacctgccttagcttctcatttgtacaatttgcaaaatgctaagaggatcattgtgcacatttaatgcgattatatcttatatcttttcttttttttttgagacagagtttcgctcttgttgcccaggctggagggcagtggtgcaatctcagctcactgcaacctccacctcccaaattcaagtgattctcctgcctcagcctcccgagtagctgagattacaggcacgcaccaccacatccagctaatttttgtatttttagtagagatggggtttcaccatattggccatcctggtctcgaattcctgatctcatgatccacccaccttggcctcccaaagtgctaggattacaggggtgagccaccatacctggctggaattatatctttgaagtcacaggacagcacctggcacatagcaagaactaataaatgtagctataatgaccactactttcctctcttgtcattggtgtctcccatggcacaatcaccccatgggattcaatgcacattaatttacttaagagcctcaaatttcttcatttttacttttggattgttaaataaatattaatttctgaattgaatgggctttcccttggaccacattctacttcttcgttttgcaaatgattccatcctgattgttgctccttccctatttcttattagttatttttcataatactttctattcctatcccccaacaccattttcttccttccttaggaaattcttcttcttgtgcccatactctggaactttcctacgacaaggagcaatttgctgtatgtttattttctttggaatcatctctccttcatggaagcagggttatttatcaacctgtgatggagctcttcctggtttggttagggcatgctgcatactgctcctgtaataatgctttctttggccaggacacaaaccacagtcaaaaaaggtcttcctgagttctgaaggtcaagcaattagaattttctcaggcttgtagaagagtggaattctggaaaccagtcttcgcctcaggggagcatctgttggaagttcttaggtaagtactggacttaaaattggtgaagtgtaggtgaagttctcgctctgctacttcctgccaggtagctgccaggctagtcaccttacctctctgagcctcaatatcctcatctatcacatgggtgtacagtagcattattctgatgttgtgttgtaagttctcagaaaaagatacccaaaatgaagccctcagaagcaaaagtttttctctgaccttatcctgttctgtccttggcacctcattctgccactaggctagccacagaaactagagtctctggctaggcacggtggctcatgcatgcactttgggaggccaaggctgatgggtcacttgaggtcaggagcttgaaagcagcctggccaatatggtgaaaccccgtctctactaaaaatgaaaaaattagctgggcatggtggcacatgcctgtaatcccagctactcaggaggctgaggcacgagaatcacttgaaccagggaggtggatgttgcagtgagccgagatcgtgccactacactctaccctgggcaacagactaacagactgagacttgtcaaaaaaaaaaaaagaaagaaagaaaagaaggaaggaaggaaagaagggagggagggaaagagaaaagaaagaaaagagagaaagagaaagaagaaagaaagaaagaaagaaagaaagagaaaaagaaagaaaaaagaaagaaagaaagaaagaaagaaagaaagaaagaaagaaagaaagaaaaagttagaagctctcatctccaagagagatcatagaaaccagaaccccttttctctcaaagcccaccataaaacctaaaaatattactctaaccttacctctctaccctcaccagcctttttgtgtaaaaactggccttaaagaagttatctgacctgtcttatttaattgtaggttattggatcctcattccagagagggccctgctccatacccagaaggaaggaatgctgcacagagaggccaataagaatctagacagggctggctcagtttccccagcctgtgagcattagatcacccctttttgtccaatcacttttctacacagctgtccatacttcaaacctgatcataaaaatgggcagcgtcttctgtatctttgggtcttcattctgaagtctcccatgtcacatacaactctgatcaaatacatttgtatgccttttctcctatcaatttgcctcttgtcagtgactttcagtgactctttaaagggcagaggggaattttttcccctggtccctacagtgtgaaaactaaactgaaacaatatgatagtttgtgaattgtaaagtactacaaaaatgggagttgctactaatgcaaactttaataggaaaccagtgacagacataaagcagggaatagttcttcttagtttggatcacatagtgtcatgtgcagacacacaagactaattcaggatactttggtggagagccacattgaggattttcataagtaaagcagacaaatggaactagttattcatggccacagtccctcttagtagttccagagaataggctcatcaaagaataattttaggctgggcgcagtggctcacacctgtaatcctagcacttcaggaggctgaggtgggcagattgcctgagttcaggagttcgagaacaccctgggccacatggtgaaaccctgtctctattaaaatacaaaaaattagccgggcttagtggcgtgtgcctgtagtcccagctactcgggaggctgaggcaggagaactgcttgaacctaggaggcagagactgcagtgagctgagatcacgccattgtactccagcctaggcaacaagagcaaaactccatctcaaaaaaaaaaaaattaattttaatttgtgaatctcagtaggaaaaggtttcagaagtagagttaaatgacctacgtagcctcttaaatgggccttcccttcttctgccttcactgccatctttcctggatcccctgtcctcaagaagtcgggtctgcatgggtcatcaggaactctcttgccccatctggctcttatgatacagaattttctagtgctcactgccagccctacaactttttctcaaagttcagttgctgctaggctcagattttccctacctgaaaaacaggggtagtgaaatccataacacacgtctaaacagaacattttggaaacacagaaagatgactaatactgcctgggaggggggaagacttcacaaggaagctaattttagagttaagtcctaaaagtgaaggaggtgttgccagcaggtaaagggttggaaggaaccctgctccctgtcccccagtagaggtaacagcctgtgctttggacaaaggcctcaaagagcttgctgtgctcatgaagcagcaggtaatggtcctgctggagtgagggctacgtgggggttgggggaggggcctggtagtgctgaagcggaaggggttcgggggaaagggtcccctggagtctggccatgtgagcctgcgaccccaaccacctcctacccaccatttctcccacagctgcaaagaggcatcacttttttgtcccaaatggaaggtaattttgttagatgcatttttcagccaacctctgataagagttaaaaataacttccaaggtgagccccctgatcagtctcctcttttatctcctccttttctttaaacctcggcatctattatgagccctcccccatcttcctccctggggacagagggcctctcatgcaaataagactctggtggccagctgtgacagcccagagtcaccaaggtcagtattccgatcagggtttcaattctccaatactgtgtgtcggtggtaatctggaaccagttacttcatttctcctgcctcagtttccacattgattaaagggctgttggggataaattagatgatgtatgggcttctctgttcctaaatcctggttcttttttttggagatggagtctcactctgtcgttcaggctggaggcagtgatgtgatctcggctcactgcaacctcggcctcccaggttcaagcaattctccttcctcagcctcctgagtatctgggattacaggtgtacaccaccatgcctggctaatttttgtgtttttagtagagatggggtttcaccatcttggccaggctggttttgaactcctgacctcaagtgatccgcccaccttagcctcccaaagtgctggaattacaggcatgagccaccatgcaatgcctgcttctttcatgcctcaagacctttgccctttccattccctctgtcagaaatactcttctcctggcttttcatgtatctggctccttcttagctgaaatatcccctttttgggttgcctttcctgtctaatgtagtttcctccatcgttctctatcacaacactcctttcctcatagacgaattgcagcttatcattatctatttgaggacttgctgtcttatatcaggctttctaagaatggatcctgagatgaggatacatgggcaagtgatttattaaggaggggcagccagtaagggagtgggggagcaggacaggggtaggcaaggaggaaagtgcgggtgggatttgaggcagagtctcagcttaaacctgatcccacaggggagctctgcagtataaattctgccttggagtttatcccaacttgaagcaaataaactgtgtttttattcctgtagcagtcagtcagtggctaagggccactggggtagggtttagagtgggatagactcccatgcacttccatcttcctccagctgcccaagaacatgtctctggaaagttgcaggtgcggccatcgcagaaaacacacacaggagctgggggagaggcacagagaaacagtgtaggatccagccaacaggaccaggacagcactggctacactggcttatcgattacatcccacaatagaaagtaagctccccagggcagataccttatcttcctgtttactgatatatccctaatgccatttgcgtagtacctgccccatagctggcaatcaattactttcttaaatgaatgaaggaagctcttagtgcagtgtgtggcatataggaagtgttcagttaatgttgttggaaacatgagtctgtatactttttcacccttctcatgcttctatccataacatagggatgctcaggcatatggcctcagaaacatgggctattgagacagagaaaaagacaactctggaaggagagagcctggccttacagaagacatctgaactatcaatcaacagaaatctcacgtatagttgaaggcaagtcataagagtggggtgggagatggataagtcaatcctacagttaaaagaggggatgtctaaccactagacaattgtccaactcaggaagtaacagcttcagggtcctagacaacataggatttgacctcatgtgcgagaaggcaggatcttagggcctcagaggaaagggctgggattcaggacaaatatttggtcctggcagggctgaggagtactgaacaaagataacatggcaaaagcctaggccgatggagtggctagcctacagtgagcattaggcactaaagaaaaactcttttgcccttctcatacaacacttctgataccaaatgtgtggagtttttccacacaagcaattctccaattcactgctgtcaccaactgggtgtccaacaatcccatcccatcccatcccatcccatcccaccccatcccatcccatcccatcccatcccatcccatcccaccccatcccatcccatcccatcccatccaatcccatccaatcccatccaatccaatccagtccaatccaatcccatccagacactatctacctggagttagtgtcagatcccagaaggtaaagggctcaatcccacaagactgccctacttcagatgcccaaatcaaaagtctgggccacctgtacttacttctttttttttttttttttttttttttttttgagatggagtctccctctatcacccaggctggagttaagtagcacaatcttggctcactgcaacttccatctcccaggttcaagcctcagcctcctgagtagctgggactacaggtgtgtgccaccacacccagctaattttttgttattttttagtagagacagggttttactctatgttggccaggctggtctcaaactcctgacctcaggttggccacctgtacttctaaccaactagcttacaaattgggggctcccatgcctccctcctcaggtttgacaatttgctagaatggctcacagaactcaggaaggcactttacttacatttactggtttattataaaggctaccactcaggaacagtcaatggaagggatgcacagggcaagacatgggatggggaggggaggggtatgcagagctcccatggccttccaggcacaccatcctccctgcacctcaatgtgttcaccaagctggaagctcatcacatctcatgcagaacttttgtagagctctatctccagcccctctactccttccaggaggtcagagggtagggttgaaaatgacaaccctcccttggccaggtgcggtggctcacgcctgta

SEQ ID NO: 57 - DNA, 201 bp, Homo sapiens
tcccttcagccctgtcccaggggtgcccagaacccaccgcacccctccacaaggcttcggccagccagggggcctcagccaggcccctacctccaaggtgytgggatcaccattgaccagcaagcagaggacagggatctcgatgctgccagtgcctgtggacagggcacccgtgaggcctgaggaccctccgcctggggt

SEQ ID NO: 58 - DNA, 201 bp, Homo sapiens; identical to SEQ ID NO: 45

SEQ ID NO: 59 - DNA, 201 bp, Homo sapiens
ctccagtattgacaaagattctaaagaagcaattacagcactatacttcatggactcctttgcacggaaaaatgactctaccatctctccttgtctgttcrttggaaccagtctgggaatggtgttaatcatctccttaaacctaccattagcagatgaacaaaggtttacagagccagtcatggtattgccaagtggtaa

SEQ ID NO: 60 - DNA, 201 bp, Homo sapiens
ccacattcagctcaggaagaagacagctttccacaatttgatcaagctcatcacaggatggaccccaaaggctgcttgtaaacagaggctcatcttccttrtatttctgtaggaaaagttttacaatttaatttttactcatacttacgcaggtattgaatttgtgagtaaataagtattttcactgtctcagatccaatg

SEQ ID NO: 61 - DNA, 201 bp, Homo sapiens
gatcctgcagtcccctagctgggcaatggaacttccttgctgctattattatacaattacagtaatgttggtcttctcattcatgccacaatacagcacaragcttacagttaaggaaataggagtcctctgctttttaaagaggtcaacatcagttcagttttcttatcacccattacccatccgggcctatggccataa

SEQ ID NO: 62 - DNA, 201 bp, Homo sapiens; identical to SEQ ID NO: 39

SEQ ID NO: 63 - DNA, 201 bp, Homo sapiens; identical to SEQ ID NO: 40

SEQ ID NO: 64 - DNA, 201 bp, Homo sapiens
tcaacctgggcacacctgagcatttttatcttcatgtacaaggaccatcgttgctctgtgatcataaccctccgcatgtctatcttctgagtcacggcggsagtctggaccagctgctcgctattgctaggccggagcacagctgtcctcccaggagctcccttgtcctccgccggcttcaggatccctgtatcccgtgtc

SEQ ID NO: 65 - DNA, 201 bp, Homo sapiens; identical to SEQ ID NO: 45

SEQ ID NO: 66 - DNA, 201 bp, Homo sapiens
ataaggtctgatggggacagacctggggtgaatctcagtggcacttctcaacagctatagatccctaagtaagttatctaatcatcatccccacagtgttytcagatgaaaatggggggtaataccccatctcataggagtttaaaaggattaaatagggaatgtagctatcatcttgtgcctggaattctgcaaagcata

SEQ ID NO: 67 - DNA, 201 bp, Homo sapiens
accaaagacacctggggttgttttctgcttcttgttgtttgttgttttattttgcaagagcagataatgatcagtttagagtctggtttccctggtgccaraaacaaaccctagtacctcctgtttctggctcaactgtccccagccgtctcaagtgatccagttggaacgcggagaacagagaacaactgacttcccctt

SEQ ID NO: 68 - DNA, 201 bp, Homo sapiens
tttatgtgataacacccagcctggcagtatagcacccttgccacccacagctctctggaaggtacagctgtacaagataacatgaggtaatgtgacttctrgggataggtggtggtggggaagcccatcactgcttagaccagcgtcgaacatgcctgacccaggtggagtaaattatttgctcagaaatgacttgtgtgg

SEQ ID NO: 69 - DNA, 201 bp, Homo sapiens; identical to SEQ ID NO: 39

SEQ ID NO: 70 - DNA, 201 bp, Homo sapiens; identical to SEQ ID NO: 66

SEQ ID NO: 71 - DNA, 201 bp, Homo sapiens; identical to SEQ ID NO: 67

SEQ ID NO: 72 - DNA, 201 bp, Homo sapiens; identical to SEQ ID NO: 68

SEQ ID NO: 73 - DNA, 17 bp, Homo sapiens
ccctacctccaaggtgc

SEQ ID NO: 74 - DNA, 17 bp, Homo sapiens
ccctacctccaaggtgt

SEQ ID NO: 75 - DNA, 18 bp, Homo sapiens
aatgtggtggcctgagag

SEQ ID NO: 76 - DNA, 20 bp, Homo sapiens
caaagtgattttgggacaac

SEQ ID NO: 77 - DNA, 20 bp, Homo sapiens
caaagtgattttgggacaat

SEQ ID NO: 78 - DNA, 25 bp, Homo sapiens
gaatactgaaaactcactcatttgt

SEQ ID NO: 79 - DNA, 17 bp, Homo sapiens
cagcgtggctgtctgtt

SEQ ID NO: 80 - DNA, 17 bp, Homo sapiens
cagcgtggctgtctgtc

SEQ ID NO: 81 - DNA, 21 bp, Homo sapiens
tccctctgggactctcatact

SEQ ID NO: 82 - DNA, 16 bp, Homo sapiens
cagctggtccagactg

SEQ ID NO: 83 - DNA, 16 bp, Homo sapiens
cagctggtccagactc

SEQ ID NO: 84 - DNA, 20 bp, Homo sapiens
ggcagggcctttcatcttct

SEQ ID NO: 85 - DNA, 21 bp, Homo sapiens
aacagaggctcatcttcctta

SEQ ID NO: 86 - DNA, 20 bp, Homo sapiens
acagaggctcatcttccttg

SEQ ID NO: 87 - DNA, 23 bp, Homo sapiens
tgagcacattggatctgagacag

SEQ ID NO: 88 - DNA, 20 bp, Homo sapiens
catctctccttgtctgttca

SEQ ID NO: 89 - DNA, 19 bp, Homo sapiens
atctctccttgtctgttcg

SEQ ID NO: 90 - DNA, 24 bp, Homo sapiens
cagtgaaggaatgaatgaatacaa

SEQ ID NO: 91 - DNA, 20 bp, Homo sapiens
gcatggagacaggtagacac

SEQ ID NO: 92 - DNA, 20 bp, Homo sapiens
gcatggagacaggtagacag

SEQ ID NO: 93 - DNA, 24 bp, Homo sapiens
caacatcacagcttaaagatacaa

1. A method for identifying an individual who has an altered risk for developing liver fibrosis, comprising detecting a single nucleotide polymorphism (SNP) in any one of the nucleotide sequences of SEQ ID NOS:1-15 and 31-45 in said individual's nucleic acids, wherein the presence of the SNP is correlated with an altered risk for liver fibrosis in said individual.

2. The method of claim 1 in which the altered risk is an increased risk.

3. The method of claim 1 in which the altered risk is a decreased risk.

4. The method of claim 1, wherein the SNP is selected from the group consisting of the SNPs set forth in Tables 6 and 7.

5. The method of claim 1 in which detection is carried out by a process selected from the group consisting of: allele-specific probe hybridization, allele-specific primer extension, allele-specific amplification, sequencing, 5′ nuclease digestion, molecular beacon assay, oligonucleotide ligation assay, size analysis, and single-stranded conformation polymorphism.

6-11. (canceled)

12. An isolated polynucleotide which specifically hybridizes to a nucleic acid molecule containing a single nucleotide polymorphism (SNP) in any one of the nucleotide sequences in SEQ ID NOS:1-15 and 31-45.

13. The polynucleotide of claim 12, which is an allele-specific probe.

14. The polynucleotide of claim 12, which is an allele-specific primer.

15. The polynucleotide of claim 12, wherein the polynucleotide comprises a nucleotide sequence selected from the group consisting of the primer sequences set forth in Table 5 (SEQ ID NOS:73-93).

16. A kit for detecting a single nucleotide polymorphism (SNP) in a nucleic acid, comprising the polynucleotide of claim 12, a buffer, and an enzyme.

17. (canceled)

18. A method for identifying an individual who has a risk for progressing rapidly from minimal fibrosis to bridging fibrosis/cirrhosis, comprising detecting a single nucleotide polymorphism (SNP) in any one of the nucleotide sequences of SEQ ID NOS:1-15 and 31-45 in said individual's nucleic acids, wherein the presence of the SNP is correlated with a risk for a rapid rate of progression to bridging fibrosis/cirrhosis in said individual.
